(19) United States
(12) Patent Application Publication
(10) Pub. No.: US 2018/0169230 A1
(43) Pub. Date: Jun. 21, 2018

(54) COMBINATION CANCER THERAPIES

(71) Applicant: Merrimack Pharmaceuticals, Inc., Cambridge, MA (US)

(72) Inventors: Sharlene ADAMS, Waltham, MA (US); Michael CURLEY, Boston, MA (US); Gregory J. FINN, Watertown, MA (US); Chrystal U. LOUIS, Somerville, MA (US); Alexey Alexandrovich LUGOVSKOY, Belmont, MA (US)

(21) Appl. No.: 15/577,382

(22) PCT Filed: May 27, 2016
(86) PCT No.: PCT/US2016/034846

§ 371 Date: Nov. 28, 2017

Related U.S. Application Data
(60) Provisional application No. 62/168,553, filed on May 29, 2015.
(60) Provisional application No. 62/245,825, filed on Oct. 23, 2015.

(51) Int. Cl. A61K 39/395; C07K 16/28; C07K 16/32; A61P 35/00

(52) U.S. Cl. CPC A61K 39/395; C07K 16/2827; A61K 2039/507; C07K 16/32; A61P 35/00; C07K 16/2863

(57) ABSTRACT

The disclosure provides methods of treatment for cancer in patients using bispecific anti-IGF-1R, anti-ErbB3 antibodies in combination with one or more therapeutic agents that impede regulatory T-cell agents. In certain embodiments, said one or more therapeutic agent may be an antagonistic anti-receptor antibody that immunospecifically binds human PD-L1.

### RELATED APPLICATIONS

[0001] This application claims priority to, and the benefit of, U.S. Provisional Patent Application Nos. 62/168,553 and 62/245,825, filed May 29, 2015 and Oct. 23, 2015, respectively. The entire content of the aforementioned patent applications are incorporated by reference in its entirety.

### SEQUENCE LISTING

[0002] The instant application contains a Sequence Listing which has been submitted electronically in ASCII format and is hereby incorporated by reference in its entirety. Said ASCII copy, created on May 27, 2016, is named MMJ_067PC_Sequence_Listing.txt and is 984,902 bytes in size.

### BACKGROUND

[0003] Tumor cells express receptors for growth factors and cytokines that stimulate proliferation of the cells. Antibodies to such receptors can be effective in blocking the stimulation of cell proliferation mediated by growth factors and cytokines and can thereby inhibit tumor cell proliferation and tumor growth. Commercially available therapeutic antibodies that target receptors on cancer cells include, for example, trastuzumab which targets the HER2 receptor (also known as ErbB2) for the treatment of breast cancer, and cetuximab which targets the epidermal growth factor receptor (EGFR, also known as HER1 or ErbB1) for the treatment of colorectal cancer and head and neck cancer. Antibodies in development include seribantumab, which targets the HER3 receptor (also known as ErbB3), which is being developed for the treatment of several types of cancer, and mapatumumab, which is an antibody against the TRAIL receptor.

[0004] Istiratumab (MM-141) is a fully human, tetravalent, bi-specific monoclonal antibody that binds to IGF-1R and ErbB3, and co-inhibits IGF-1R and ErbB3 signaling (disclosed, e.g., in U.S. Pat. No. 8,476,409 and herein). Using a Systems Biology approach, MM-141 was designed to be more active than mono-specific antibodies and their combinations at blocking IGF-1 and IGF-2 from binding to the IGF-1 receptor (IGF-1R), and heregulin (HRG) binding to its receptor ErbB3. These studies also demonstrated that simply inhibiting IGF-1R was not sufficient, since inhibiting IGF-1R leads to an increase in ErbB3 expression and thus allows ErbB3 to act as a compensation mechanism. Hence, dual blockade of this pathway is needed to effectively inhibit cancer cells that rely upon IGF-1 and/or ErbB3.

[0005] Immunotherapeutics have rapidly become an important option for patients and oncologists in the treatment of malignant diseases. Immunotherapy, at its most basic level, uses the immune system to fight cancer and disease. When the immune system is working properly, it is able to identify foreign and harmful components within the body and eliminate them. For example, when patients are infected with the flu virus or a bacterial infection, the immune system will recruit white blood cells and other immune cells to the site of the infection. Once there, the different components of the immune system work together to target the foreign viruses or bacteria and remove them from the body.

[0006] Cancer cells use a variety of mechanisms to remain invisible to the immune system. In some cases, the cancer cells down-regulate cell surface markers or proteins that would normally be used by the immune system to recognize the cells as being foreign and therefore targeted for destruction. Cancer cells and other cells within its microenvironment can also secrete soluble proteins, called cytokines or chemokines, which limit the function of immune cells. Furthermore, cancer cells can recruit other cells to make the immune system think they are normal or “host” cells that should not be destroyed.

[0007] One of the mechanisms that the body uses to prevent the immune system from attacking normal tissues and/or leading to autoimmune disease is to modulate the number of regulatory T cells (“Tregs”) in any location. Genetic mutations leading to severe decreases in either the number or function of Tregs have been reported to lead to autoimmune disease. However, cancer cells have modified this paradigm by recruiting Tregs to its microenvironment in order to make them invisible to the immune system. Many studies have noted that elevated levels of Tregs within the tumor microenvironment are associated with poor responses to therapy and poor overall survival. Immunotherapeutics targeting Tregs have led to improvements in clinical response rates, thus suggesting the importance of this pathway in a subset of cancer types.

[0008] Cancer immunotherapy, irrespective of treatment modality (i.e., adoptive cellular therapy, vaccines, monoclonal antibodies, and checkpoint inhibitors) and target (i.e., CD19, GD2, PD1, PD-L1, and T regs), has shown promise within a subset of patients. The goal is to expand the clinical utility of these agents, either alone or in combination, in order to provide all patients with the optimal chance of being cured of their cancer. Thus, there is an unmet need to discover not only therapeutics that target cancer cells, but also those that target cells within the microenvironment that allow cancer cells to evade detection by the immune system, e.g., Tregs. The disclosure below addresses this need.

### SUMMARY

[0009] Disclosed herein are methods for providing treatment for a cancer in a human patient. These methods comprise administration to the patient of an effective amount of a bispecific anti-IGF-1R/anti-ErbB3 antibody that exhibits immunospecific binding to the extracellular domain of human IGF-1R (CD221) and to human ErbB3 together with a therapy that can impede Treg activity. In preferred embodiments the binding to IGF-1R is characterized as inhibiting IGF-1 mediated activation of human IGF-1R. In other preferred embodiments the dosage and administration of the antibody are adapted for one or more of: a) the inhibition of proliferation in IGF-1R ligand-dependent and/or IGF-1R ligand-independent IGF-1R expressing immune cells; b) the inhibition of differentiation of IGF-1R expressing immune progenitor cells into T cells, NKT cells, or NK cells, and c) depletion of IGF-1R expressing immune cells. Such adaptation may include administration in combination with other antibodies or drugs or therapies, e.g., as described hereinbelow. Thus, the bispecific antibody may be administered as monotherapy or in combination with an effective amount of one or more of: a small molecule immunomodulatory agent, one or more antineoplastic agents (“chemotherapy”), radiation, an anticancer vaccine, and an immunomodulatory antibody that does not bind to human IGF-1.

[0010] In other embodiments, the immunomodulatory antibody that does not bind to human IGF-1 is one or more of: a) agonistic anti-receptor antibodies that immunospecifically bind to human OX40, CD40, GITR, CD27, ICOS, or 4-1BB; b) antagonistic anti-receptor antibodies that immunospecifically bind to: i) human CTLA-4 (optionally ipilimumab or tremelimumab), ii) PD-1 (optionally nivolumab, pembrolizumab, or pidilizumab), iii) PD-L1 (optionally atezolizumab, durvalumab, or avelumab), iv) TIM-3, BTLA, VISTA, LAG-3, KIR (optionally lirilumab), CD47, CD25, B7-H3, or B7-H4; and c) anti-ligand antibodies that block function of IL-6, IL-10, TGFβ, angiopoetin-2, VEGF, IL-17, IL-23, or TNFα. In various embodiments the anticancer vaccine is selected from the group consisting of OncoVex, MAGE-A3, PROSTVAC, GVAX, CDX110, CDX1307, CDX1401, CV9104, BIOVAXID, IMA 901 and ADXS11-001.

[0011] Preferred bispecific antibodies are selected from istiratumab (P4-G1-M1.3), SF-G1-P1, SF-G1-M1.3, SF-G1-M27, SF-G1-P6, SF-G1-B69, P4-G1-C8, P4-G1-P1, P4-G1-M27, P4-G1-P6, P4-G1-B69, M78-G1-C8, M78-G1-P1, M78-G1-M1.3, M78-G1-M27, M78-G1-P6, M78-G1-B69, M57-G1-C8, M57-G1-P1, M57-G1-M1.3, M57-G1-M27, M57-G1-P6, M57-G1-B69, P1-G1-P4, P1-G1-M57, P1-G1-M78, M27-G1-P4, M27-G1-M57, M27-G1-M78, M7-G1-P4, M7-G1-M57, M7-G1-M78, B72-G1-P4, B72-G1-M57, B72-G1-M78, B60-G1-P4, B60-G1-M57, B60-G1-M78, P4M-G1-M1.3, P4M-G1-C8, P33M-G1-M1.3, P33M-G1-C8, P4M-G1-P6L, P33M-G1-P6L, and P1-G1-M76; each of which is described in U.S. Pat. No. 8,476,409 and herein. In one embodiment, the bispecific antibody may be administered intravenously at one of the following schedules: 6 mg/kg qw, 9 mg/kg qw, 8 mg/kg qw, 10 mg/kg q2w, 12 mg/kg q3w, 18 mg/kg q3w, 20 mg/kg q3w, 30 mg/kg q3w, 20 mg/kg qw, or 40 mg/kg q2w. In another embodiment, the bispecific antibody may be administered intravenously at 2.8 g q2w, 2.24 g q2w, or 1.96 g q2w. Administration may be intravenous or subcutaneous.

[0012] In various embodiments the bispecific antibody has been engineered to increase or decrease binding to the Fc receptors. In others, the bispecific antibody exhibits preferential binding to regulatory T cells compared to CD8 positive (CD8+) cytotoxic T cells. Preferably, the regulatory T cells are CD4 positive (CD4+) and either or both of CD25 positive (CD25+) and FoxP3 positive (FoxP3+). In other embodiments, the bispecific antibody can counter the inhibitory effects of IGF-1 and heregulin ligands on plasmacytoid dendritic cell activity as well as inhibit the suppressive activity of myeloid-derived suppressive cells on CD4+ T cell proliferation, both of which may potentially improve the anti-tumor immune response.

[0013] The methods of treatment and other inventions disclosed herein are based in part on discoveries provided herein. For example, as outlined in the Examples below, the Applicants have discovered: (i) regulatory T cells and other immune cells express IGF-1R and ErbB3 on their surface; (ii) the ligand IGF-1 can stimulate Treg induction from CD4+ T cells and Treg proliferation, which can be inhibited by co-treatment with istiratumab in vitro; (iii) istiratumab monotherapy treatment has an improved anti-tumor effect in immune-compromised and immune-competent mouse models of cancer that do express or do not express IGF-1R and ErbB3 on their cell surface; and (iv) istiratumab can potentiate the activity of anti-PD-L1, anti-CTLA-4 or anti-PD-1 therapeutics in mouse models of cancer.

[0014] In accordance with another aspect, the patient to be treated using the methods disclosed herein is selected for treatment by assessing a biomarker level in a biopsy of the cancer and the patient is treated with the bispecific antibody if the biopsy exhibits a level that is predictive of a favorable response to the treatment. In various embodiments of this aspect, the biomarker is 1) fraction of IGF-1R positive regulatory T cells, 2) fraction of IGF-1R positive cytotoxic T cells, or 3) the ratio of 1) to 2); and the level that is predictive of a favorable response to the treatment is where 1) or 2) or 3) is higher than the fraction or ratio corresponding to a population median level of patients with the cancer. In other embodiments of this aspect, the biomarker is serum free IGF-1 and the level that is predictive of a favorable response to the treatment is where the patient's serum free IGF-1 concentration is higher than a population median level of patients with the cancer. In yet other embodiments of this aspect, the biomarker is biopsy heregulin level and the level that is predictive of a favorable response to the treatment is where the biopsy heregulin level is higher than a population median biopsy heregulin level of patients with the cancer; or the biomarker is biopsy heregulin level and the level that is predictive of a favorable response to the treatment is a biopsy heregulin level that is sufficient to be detectable by RT-PCR; or the biomarker is biopsy heregulin level and the level that is predictive of a favorable response to the treatment is a biopsy heregulin level that sufficient to be detectable by RNA-ISH.

[0015] In one embodiment, a therapeutically effective amount of istiratumab can be used (e.g., intravenously administered) as an immune-oncology monotherapy to treat colorectal cancer, melanoma, B-cell lymphoma or fibrosarcoma cancer in a human patient without a diagnosed active autoimmune condition. In another embodiment, the use of an antineoplastic therapy can consist of administering istiratumab in combination with an immunomodulatory agent selected from the group consisting of: an anti-PD-L1 antibody, an anti-CTLA-4 antibody and an anti-PD-1 antibody, to treat colorectal cancer, melanoma, B-cell lymphoma or fibrosarcoma cancer in a human patient having immune cells expressing IGF-1R and ErbB3 and without a diagnosed active autoimmune condition. In a third embodiment, a therapeutically effective amount of istiratumab can be used as an immune-oncology to treat a cancer that does not express at least one of IGF-1R and ErbB3 in a human patient without a diagnosed active autoimmune condition, and having immune cells expressing IGF-1R and ErbB3. In a fourth embodiment, an antineoplastic therapy consisting of istiratumab in combination with an immunomodulatory agent selected from the group consisting of: an anti-PD-L1 antibody, an anti-CTLA-4 antibody and an anti-PD-1 antibody, can be used to treat a cancer that does not express at least one of IGF-1R and ErbB3 in a human patient without a diagnosed active autoimmune condition, and having immune cells expressing IGF-1R and ErbB3 in a human patient without a diagnosed active autoimmune condition.

[0016] Preferably, the human patient can have immune cells that express IGF-1R and ErbB3. The human patient can have Treg cells expressing IGF-1R and ErbB3. The ligand IGF-1 can be present in the human patient (e.g., as serum free IGF-1 ligand, or elsewhere in the human such as in a tissue biopsy). A therapeutically effective amount of istiratumab can be administered once every week or once every two weeks. In some embodiments, the therapeutically effective amount of istiratumab is a fixed dose of 2.8 g, 2.24 g, or 1.96 g administered once every two weeks. In another embodiment, the therapeutically effective amount of istiratumab is 20 mg/kg administered once every week or 40 mg/kg administered once every two weeks.

### BRIEF DESCRIPTION OF THE DRAWINGS

[0017] FIG. 1 is a graph demonstrating the mean percent expression of IGF-1R positive (IGF-1R+) regulatory T cells (“Tregs”; here identified as CD4+CD25+FoxP3+ cells) and CD8+ effector T cells (“CD8”) in lymphocyte populations of human whole blood, as measured by quantitative flow cytometry.

[0018] FIG. 2 is a set of panels showing the levels of IGF-1R+ Tregs in lymphocyte populations of wild-type C57BL/6 mouse-derived splenocytes that have been stained by an anti-IGF-1R antibody compared to a non-IGF-1R-antibody-stained control, as measured by quantitative flow cytometry. The lower two panels comprise cells stained with an anti-IGF-1R antibody, and the top two panels are unstained (control) cells. In the left hand panels the dots in the inner large square represent CD4+CD25+(Treg) cells. To obtain the data in the right hand panels, the Treg cells from the left hand panels inner square were re-analyzed again; the dots in the inner top right square represent those of the CD4+CD25+ cells that are also IGF-1R+FoxP3+. These data show that almost half of the Treg cells express IGF-1R.

[0019] FIG. 3A and FIG. 3B are a series of panels showing the effect of IGF-1 on the induction of Tregs from CD4+ cells, as measured by flow cytometry (FIG. 3A) and the effect of IGF-1 on the proliferation of Tregs as evidenced by the number of population doublings using carboxyfluorescein succinimidyl ester (CFSE)-fluorescein isothiocyanate (FITC) staining analyzed by flow cytometry. The percentage of Treg cells increased from 0.908% (left panel) to 3.91% (right panel) of CD4+ cells treated with 0 and 200 ng/mL IGF-1, respectively (FIG. 3A). Analyses of proliferation measured by CFSE demonstrated greater dilution of CFSE post-treatment with 200 ng/mL IGF-1, indicative of enhanced proliferation of Treg populations (FIG. 3B).

[0020] FIG. 4A and FIG. 4B are a set of graphs demonstrating the effect of treatment with istiratumab on the mean percent expression of IGF-1R+ cells (per total lymphocyte population) from mouse splenocyte-derived Treg (defined as CD4+CD25+FoxP3+) and CD8+ cells (FIG. 4A) and the mean percent expression of ErbB3+ cells (per total lymphocyte population) from mouse splenocyte-derived Tregs (FIG. 4B), as measured by quantitative flow cytometry.

[0021] FIG. 5 is a graph demonstrating the effect of treatment of IGF-1 and istiratumab, alone and in combination, on splenocyte-derived FoxP3+ cells per CD4+CD25+ cells (represented as % Tregs) in vitro, as measured by flow cytometry.

[0022] FIG. 6 is a graph demonstrating the effects of treatment with phosphate-buffered saline (PBS, representing the vehicle control treatment) or istiratumab on A20 B cell lymphoma tumors inoculated subcutaneously into immuno-competent (wild-type, wt) and athymic (nu/nu) mice. The x-axis is days post tumor cell implantation and the y-axis is tumor volume (mm³).

[0023] FIG. 7 is a graph demonstrating the effects of treatment with PBS or istiratumab on MC38 colorectal tumors inoculated subcutaneously into immuno-competent (wild-type, wt) and athymic (nu/nu) mice. The x-axis is days post tumor cell implantation and the y-axis is mean tumor volume (mm³).

[0024] FIG. 8 is a graph demonstrating the effects of treatment with PBS or istiratumab on B16-F10 melanoma tumors inoculated subcutaneously into immuno-competent (wild-type, wt) and athymic (nu/nu) mice. The x-axis is days post tumor cell implantation and the y-axis is mean tumor volume (mm³).

[0025] FIG. 9A, FIG. 9B and FIG. 9C is a series of graphs demonstrating the basal and phosphorylated expression of IGF-1R, ErbB3, phosphorylated AKT (pAKT), phosphorylated ERK1/2 (pERK1/2) and beta actin in A20 B cell lymphoma cells (ATCC® TIB-208) by western blotting (A) and the effects of treatment with PBS, istiratumab, anti-PD-L1 (atezolizumab) and istiratumab+anti-PD-L1 in combination on mice inoculated with IGF-1R/ErbB3 negative A20 tumor cells (B, in which each x-axis is days post-tumor cell implantation and each y-axis is tumor volume (mm³)). In part C, mice who achieved a complete response to treatment (CR; n=4, data points plotted using triangles) with anti-PD-L1+istiratumab (as outlined in part B) retain anti-tumor immunity upon re-challenge with A20 cells two months after stopping drug treatment. Data from naïve mice inoculated with A20 cells (to confirm tumorigenicity of the inoculated cells) are plotted using diamonds.

[0026] FIG. 10A and FIG. 10B is a set of data demonstrating the basal expression of IGF-1R, ErbB3, pAKT, pERK1/2 and beta actin in WEHI 164 fibrosarcoma cells (ATCC® CRL-1751™) by western blotting (A). Panel B shows the effects of treatment with PBS, istiratumab, anti-PD-L1 (atezolizumab) and istiratumab+anti-PD-L1 in combination on mice inoculated with IGF-1R/ErbB3 positive WEHI 164 tumor cells. The x-axis is days post tumor cell implantation and the y-axis is mean tumor volume (mm³).

[0027] FIG. 11A and FIG. 11B is a series of graphs demonstrating the basal expression of IGF-1R, ErbB3, pAKT, pERK1/2 and beta actin in MC38 colorectal cells by western blotting (A). FIG. 11B shows the effects of treatment with PBS, istiratumab, anti-PD-L1 (atezolizumab) and istiratumab+anti-PD-L1 in combination on mice inoculated with IGF-1R/ErbB3 positive MC38 tumor cells in which each x-axis is days post tumor cell implantation and each y-axis is tumor volume (mm³).

[0028] FIG. 12A and FIG. 12B is a set of data demonstrating the basal expression of IGF-1R, ErbB3, pAKT, pERK1/2 and beta actin in B16-F10 melanoma cells by western blotting (A). Panel B shows the effects of treatment with PBS, istiratumab, anti-CTLA-4 (clone 9D9) and istiratumab+anti-CTLA-4 in combination on mice inoculated with IGF-1R/ErbB3 positive B16-F10 tumor cells in which each x-axis is days post tumor cell implantation and each y-axis is tumor volume (mm³).

[0029] FIG. 13 is a set of data showing the effects of treatment with PBS, istiratumab, anti-PD-1 (clone J43) and istiratumab+anti-PD-1 in combination on mice inoculated with IGF-1R/ErbB3 positive B16-F10 tumor cells in which each x-axis is days post tumor cell implantation and each y-axis is tumor volume (mm³).

[0030] FIG. 14A and FIG. 14B is a set of data showing the expression of IGF-1R and ErbB3 on various human whole blood-derived immune cell populations.

[0031] FIG. 15 is a set of data demonstrating the effects of the ligands heregulin (HRG) or IGF-1, and of MM-141 on markers of plasmacytoid dendritic cell (pDC) activity (CD83, CD86; measured by mean fluorescence intensity), interferon alpha (IFNα) expression (pg/mL media) and PD-L1 expression (measured by mean fluorescence intensity) post-activation with SD-101, as measured by flow cytometry.

[0032] FIG. 16 is a set of histograms showing the effect of MM-141 on the activity of myeloid-derived suppressor cells (MDSCs) on unactivated and activated CD4+ T cell proliferation, as measured by CFSE-FITC staining analyzed by flow cytometry.

[0033] FIG. 17A is a list of antagonistic anti-receptor antibodies.

[0034] FIG. 17B is a list of agonistic anti-receptor antibodies.

[0035] FIG. 17C is a list of anti-ligand antibodies.

### DETAILED DESCRIPTION

[0036] The current disclosure provides compositions, methods, and kits for the treatment of disorders in human and non-human patients in need thereof. Specifically, this disclosure provides methods of treatment for cancer in a patient using bispecific anti-IGF-1R, anti-ErbB3 antibodies in combination with one or more therapeutic agents that modulate immune suppressor cell, e.g., regulatory T-cell, activity (which may include but are not limited to: a small molecule immunomodulatory agent, an immunomodulatory antibody that does not bind human IGF1, an anticancer vaccine, and a radiation dose) or as a monotherapy or a combination therapy. An exemplary antibody is istiratumab (also described herein as P4-G1-M1.3). Istiratumab is demonstrated herein to be effective against cancer types expressing IGF-1R and ErbB3 on the surface of the cancer cell both with and without the addition of one or more therapeutics agents that impede regulatory T-cell activity. The combination therapy of the bispecific antibody and an agent that impedes regulatory T-cell activity has an effect on treating cancer cells that is greater than when either agent is administered at the same dose as a monotherapy. Further, istiratumab is demonstrated herein to be effective even against cancer types that do not express IGF-1R and ErbB3 on the surface of the cancer cell (see Example 4, utilizing the A20 cell line), and its anti-cancer activity primarily arises through recruitment of the antitumor activity of T cells.

### Definitions

[0037] For convenience, the meaning of certain terms and phrases used in the specification, examples, and appended claims, are provided below.

[0038] “Agent,” refers to an active molecule, e.g., a therapeutic protein, e.g., a drug.

[0039] “Aa substitution” refers to the replacement of one specific amino acid (“aa”) in a protein with another aa. A substitution may be a conservative substitution, as defined below.

[0040] “Administer” or “administration” refers to the act of injecting or otherwise physically delivering a substance as it exists outside the body (e.g., a formulation of the molecules disclosed herein) into a patient, such as by mucosal, intradermal, intravenous, intramuscular delivery and/or any other method of physical delivery described herein or known in the art. When a disease, or a symptom thereof, is being treated, administration of the substance typically occurs after the onset of the disease or symptoms thereof. When diseases, or symptoms thereof, are being prevented, administration of the substance typically occurs before the onset of the disease or symptoms thereof.

[0041] “Anti-ErbB3 binding site” refers to a binding site that binds specifically to human ErbB3.

[0042] “Anti-IGF-1R binding site” refers to a binding site that binds specifically to human IGF-1R.

[0043] “Antigen binding site” refers to a binding site that comprises the VH and/or VL domain of an antibody, or at least one CDR thereof. For example, an antigen binding site may comprise, consist essentially of, or consist of a VHCDR3 alone or together with a VHCDR2 and optionally a VHCDR1. In certain embodiments, an antigen binding site comprises a VH domain and a VL domain, which may be present on the same polypeptide, or on two different polypeptides, e.g., the VH domain is present on a heavy chain and a VL domain is present on a light chain.

[0044] “Antigen-binding portion” of an antibody refers to one or more fragments of an antibody that retain the ability to specifically bind to an antigen (e.g., IGF-1R or ErbB3). It has been shown that the antigen-binding function of an antibody can be retained by fragments of a full-length antibody. Examples of binding fragments encompassed within the term “antigen-binding portion” of an antibody include (i) a Fab fragment, a monovalent fragment consisting of the VL, VH, CL and CH1 domains; (ii) a F(ab′)2 fragment, a bivalent fragment comprising two Fab fragments linked by a disulfide bridge at the hinge region; (iii) an Fd fragment consisting of the VH and CH1 domains; (iv) an Fv fragment consisting of the VL and VH domains of a single arm of an antibody, (v) a dAb fragment which consists of a VH domain; and (vi) an isolated complementarity determining region (CDR). Furthermore, although VL and VH are two domains of an Fv fragment, VL and VH are coded for by separate genes, they can be joined, using recombinant methods, by a synthetic linker that enables them to be made as a single protein chain in which the VL and VH regions pair to form monovalent proteins, known as single chain Fvs (scFvs) see U.S. Pat. No. 5,892,019. Such single chain antibodies are also intended to be encompassed within the term “antigen-binding portion” of an antibody. Other forms of single chain antibodies, such as diabodies are also encompassed. Diabodies are bivalent, bispecific antibodies in which VH and VL domains are expressed on a single polypeptide chain, but using a linker that is too short to allow for pairing between the two domains on the same chain, thereby forcing the domains to pair with complementary domains of another chain and creating two antigen binding sites.

[0045] “Binding affinity” refers to the strength of a binding interaction and includes both the actual binding affinity as well as the apparent binding affinity. The actual binding affinity is a ratio of the association rate over the disassociation rate. The apparent affinity can include, for example, the avidity resulting from a polyvalent interaction. Dissociation constant (Kd), is typically the reciprocal of the binding affinity, and may be conveniently measured using a surface plasmon resonance assay (e.g., as determined in a BIACORE 3000 instrument (GE Healthcare) e.g., using recombinant ErbB3 as the analyte and an anti-ErbB3 antibody as the ligand) or a cell binding assay, each of which assays is described in Example 3 of U.S. Pat. No. 7,846,440.

[0046] “Binding moiety,” “binding domain,” or “binding site,” refers to the portion, region, or site of a binding polypeptide or, when so specified, of a heavy or light chain thereof, that is directly involved in mediating the specific binding of an antibody to a target molecule (i.e., an antigen). Exemplary binding domains include an antigen binding site, a receptor binding domain of a ligand, a ligand binding domain of a receptor or an enzymatic domain. In preferred embodiments, the binding domain comprises or consists of an antigen binding site (e.g., comprising a variable heavy (VH) chain sequence and variable light (VL) chain sequence or six CDRs from an antibody placed into alternative framework regions (e.g., human framework regions optionally comprising one or more aa substitutions). In certain embodiments, a binding site may be comprised essentially only of a VH or a VL chain sequence. A binding site may be entirely from one species, e.g., it has only sequences that derive from the germline sequences of one species. For example, a binding site may be human (i.e., from the human species), mouse, or rat. A binding site may also be humanized, i.e., the CDRs are from one species and the frameworks (FRs) are from another species. For example, a binding site may have CDRs that were derived from a mouse antibody and FRs that are from the human species. Certain humanized binding sites comprise mutations in one or more CDR to make the CDRs look more like the CDRs of the donor antibody. Certain humanized antibodies may also comprise mutations in one or more FR. Generally mutations in a binding site may enhance the affinity of binding of the binding site to its target antigen, and/or they may stabilize the binding site, e.g., to extend its half-life.

[0047] “CDR” or “complementarity determining region” refers to the noncontiguous antigen combining sites found within the VR of both heavy and light chain polypeptides. These particular regions have been described by Kabat et al., J. Biol. Chem. 252, 6609-6616 (1977) and Kabat et al., Sequences of protein of immunological interest. (1991), and by Chothia et al., J. Mol. Biol. 196:901-917 (1987) and by MacCallum et al., J. Mol. Biol. 262:732-745 (1996), where the definitions include overlapping or subsets of aa residues when compared against each other. The aa residues which encompass the CDRs as defined by each of the above cited references are set forth for comparison. As used herein, and if not otherwise specified, “CDR” is as defined by Kabat.

TABLE 1
CDR definitions

| | CDR Definitions | | |
|---|---|---|---|
| | Kabat¹ | Chothia² | MacCallum³ |
| VHCDR1 | 31-35 | 26-32 | 30-35 |
| VHCDR2 | 50-65 | 53-55 | 47-58 |
| VHCDR3 | 95-102 | 96-101 | 93-101 |
| VLCDR1 | 24-34 | 26-32 | 30-36 |
| VLCDR2 | 50-56 | 50-52 | 46-55 |
| VLCDR3 | 89-97 | 91-96 | 89-96 |

¹Residue numbering follows the nomenclature of Kabat et al., 1991, supra
²Residue numbering follows the nomenclature of Chothia et al., supra
³Residue numbering follows the nomenclature of MacCallum et al., supra

[0048] “CH1 domain” refers to the heavy chain immunoglobulin constant domain located between the VH domain and the hinge. It spans EU positions 118-215. A CH1 domain may be a naturally occurring CH1 domain, or a naturally occurring CH1 domain in which one or more aas have been substituted, added or deleted, provided that the CH1 domain has the desired biological properties. A desired biological activity may be a natural biological activity, an enhanced biological activity or a reduced biological activity relative to the naturally occurring sequence.

[0049] “CH2 domain” refers to the heavy chain immunoglobulin constant domain that is located between the hinge and the CH3 domain. It spans EU positions 231-340. A CH2 domain may be a naturally occurring CH2 domain, or a naturally occurring CH2 domain in which one or more aas have been substituted, added or deleted, provided that the CH2 domain has the desired biological properties. A desired biological activity may be a natural biological activity, an enhanced biological activity or a reduced biological activity relative to the naturally occurring sequence.

[0050] “CH3 domain” refers to the heavy chain immunoglobulin constant domain that is located C-terminally of the CH2 domain and spans approximately 110 residues from the N-terminus of the CH2 domain, e.g., about positions 341-446b (EU numbering system). A CH3 domain may be a naturally occurring CH3 domain, or a naturally occurring CH3 domain in which one or more aas (“aas”) have been substituted, added or deleted, provided that the CH3 domain has the desired biological properties. A desired biological activity may be a natural biological activity, an enhanced biological activity or a reduced biological activity relative to the naturally occurring sequence. A CH3 domain may or may not comprise a C-terminal lysine.

[0051] “CH4 domain” refers to the heavy chain immunoglobulin constant domain that is located C-terminally of the CH3 domain in IgM and IgE antibodies. A CH4 domain may be a naturally occurring CH4 domain, or a naturally occurring CH4 domain in which one or more aas have been substituted, added or deleted, provided that the CH4 domain has the desired biological properties. A desired biological activity may be a natural biological activity, an enhanced biological activity or a reduced biological activity relative to the naturally occurring sequence.

[0052] “CL domain” refers to the light chain immunoglobulin constant domain that is located C-terminally to the VH domain. It spans about Kabat positions 107A-216. A CL domain may be a naturally occurring CL domain, or a naturally occurring CL domain in which one or more aas have been substituted, added or deleted, provided that the CL domain has the desired biological properties. A desired biological activity may be a natural biological activity, an enhanced biological activity or a reduced biological activity relative to the naturally occurring sequence. A CL domain may or may not comprise a C-terminal lysine.

[0053] “Combination therapy,” “co-administration,” “co-administered” or “concurrent administration” (or minor variations of these terms) refers to simultaneous administration of at least two therapeutic agents to a patient or their sequential administration within a time period during which the first administered therapeutic agent is still present in the patient (e.g., in the patient's plasma or serum) when the second administered therapeutic agent is administered.

[0054] “Conservative substitution” or “conservative aa substitution” refers to the replacement of one or more aa residues in a protein or a peptide with, for each particular pre-substitution aa residue, a specific replacement aa that is known to be unlikely to alter either the confirmation or the function of a protein or peptide in which such a particular aa residue is substituted for by such a specific replacement aa. Such conservative substitutions typically involve replacing one aa with another that is similar in charge and/or size to the first aa, and include replacing any of isoleucine (I), valine (V), or leucine (L) for each other, substituting aspartic acid (D) for glutamic acid (E) and vice versa; glutamine (Q) for asparagine (N) and vice versa; and serine (S) for threonine (T) and vice versa. Other substitutions are known in the art to be conservative in particular sequence or structural environments. For example, glycine (G) and alanine (A) can frequently be substituted for each other to yield a conservative substitution, as can be alanine and valine (V). Methionine (M), which is relatively hydrophobic, can frequently conservatively substitute for or be conservatively substituted by leucine or isoleucine, and sometimes valine. Lysine (K) and arginine (R) are frequently interchangeable in locations in which the significant feature of the aa residue is its charge and the differing pK's of these two basic aa residues are not expected to be significant. The effects of such substitutions can be calculated using substitution score matrices such PAM120, PAM-200, and PAM-250. Other such conservative substitutions, for example, substitutions of entire regions having similar hydrophobicity characteristics (e.g., transmembrane domains), are well known.

[0055] A CR domain on a light chain of an immunoglobulin is referred to interchangeably as a “CL,” “light chain CR domain,” “CL region” or “CL domain.” A constant domain on a heavy chain (e.g., hinge, CH1, CH2 or CH3 domains) of an immunoglobulin is referred to interchangeably as a “CH,” “heavy chain constant domain,” “CH” region or “CH domain.” A variable domain on an immunoglobulin light chain is referred to interchangeably as a “VL,” “light chain variable domain,” “VL region” or “VL domain.” A variable domain on an immunoglobulin heavy chain is referred to interchangeably as a “VH,” “heavy chain variable domain,” “VH region” or “VH domain.”

[0056] “Domain” refers to a region, e.g., an independently folding, globular region or a non-globular region (e.g., a linker domain), of a heavy or light chain polypeptide which may comprise peptide loops (e.g., 1 to 4 peptide loops) that may be stabilized, for example, by a f-pleated sheet and/or an intrachain disulfide bond. The constant and VRs of immunoglobulin heavy and light chains are typically folded into domains. In particular, each one of the CH1, CH2, CH3, CH4, CL, VH and VL domains typically form a loop structure.

[0057] “Dosage” refers to parameters for administering a drug in defined quantities per unit time (e.g., per hour, per day, per week, per month, etc.) to a patient. Such parameters include, e.g., the size of each dose. Such parameters also include the configuration of each dose, which may be administered as one or more units, e.g., as one or more administrations, e.g., either or both of orally (e.g., as one, two, three or more pills, capsules, etc.) or injected (e.g., as a bolus or infusion). Dosage sizes may also relate to doses that are administered continuously (e.g., as an intravenous infusion over a period of minutes or hours). Such parameters further include frequency of administration of separate doses, which frequency may change over time.

[0058] “Dose” refers to an amount of a drug given in a single administration.

[0059] “EC₅₀” or “EC50” refers to the concentration of a molecule, e.g., a PBA that provides 50% of the maximal effect of the protein on a particular system such as a binding assay or a signal transduction pathway.

[0060] “Effective amount,” “effective amounts,” effective dosage,” “effective dosages,” “effective doses,” or “effective dose” refers to an amount (administered in one or more doses) of an antibody, protein or additional therapeutic agent, which amount is sufficient to provide effective treatment to a subject in need thereof. “Effective treatment” refers to a decrease or cessation in the symptoms of a disorder in the subject. In the case of cancer, effective treatment may comprise, but is not limited to, one or more of the following results: reduction in size of one or more tumors, reduction in number of tumors in a subject, reduction in number of cancerous cells in a subject, inhibition of tumor growth in a subject, or prolongation of survival time for an animal with cancer. An effective amount of the compositions of the present disclosure, for the treatment of the described conditions vary depending upon many different factors, including (but not limited to) means of administration, target site, physiological state of the patient, whether the patient is human or an animal, and other medications administered. Treatment dosages may be titrated using routine methods known to those of skill in the art to optimize safety and efficacy.

[0061] “ErbB3” and “HER3” refer to ErbB3 protein, as described herein and in U.S. Pat. No. 5,480,968. The human ErbB3 protein sequence is provided herein as SEQ ID NO: 444, which corresponds to SEQ ID NO:4 of U.S. Pat. No. 5,480,968, wherein the first 19 aas correspond to the leader sequence that is cleaved from the mature protein. ErbB3 is a member of the ErbB family of receptors, other members of which include ErbB1 (EGFR), ErbB2 (HER2/Neu) and ErbB4. While ErbB3 itself lacks tyrosine kinase activity, but is itself phorphorylated upon dimerization of ErbB3 with another ErbB family receptor, e.g., ErbB1, ErbB2 and ErbB4, which are receptor tyrosine kinases. Ligands for the ErbB family include heregulin (HRG), betacellulin (BTC), epidermal growth factor (EGF), heparin-binding epidermal growth factor (HB-EGF), transforming growth factor alpha (TGF-α), amphiregulin (AR), epigen (EPG) and epiregulin (EPR). The aa sequence of human ErbB3 is provided at Genbank Accession No. NP_001973.2 (receptor tyrosine-protein kinase erbB-3 isoform 1 precursor) and is assigned Gene ID: 2065.

[0062] “EU” indicates that aa positions in a heavy chain CR, including aa positions in the CH1, hinge, CH2, and CH3 domains, are numbered herein according to the EU index numbering system (see Kabat et al., in “Sequences of Proteins of Immunological Interest”, U.S. Dept. Health and Human Services, 5th edition, 1991).

[0063] “Fab” refers to the antigen binding portion of an antibody, comprising two chains: a first chain that comprises a VH domain and a CH1 domain and a second chain that comprises a VL domain and a CL domain. Although a Fab is typically described as the N-terminal fragment of an antibody that was treated with papain and comprises a portion of the hinge region, it is also used herein as referring to a binding domain wherein the heavy chain does not comprise a portion of the hinge.

[0064] “Fc region” refers to the portion of a single immunoglobulin heavy chain beginning in the hinge region just upstream of the papain cleavage site (i.e. residue 216 in IgG, taking the first residue of heavy chain CR to be 114) and ending at the C-terminus of the antibody. Accordingly, a complete Fc region comprises at least a hinge, a CH2 domain, and a CH3 domain. Two Fc regions that are dimerized are referred to as “Fc” or “Fc dimer.” An Fc region may be a naturally occurring Fc region, or a naturally occurring Fc region in which one or more aas have been substituted, added or deleted, provided that the Fc region has the desired biological properties. A desired biological activity may be a natural biological activity, an enhanced biological activity or a reduced biological activity relative to the naturally occurring sequence.

[0065] “Formulation” and “composition” refer to a product containing the specified ingredients (e.g., an anti-IGF-1R, anti-ErbB3 bispecific antibody) in, optionally, the specified amounts, as well as any product which results, directly or indirectly, from the combination of the specified ingredients in, optionally, the specified amounts.

[0066] “Excipient” or “Excipients” refers to inert substances that are commonly used as a diluent, vehicle, preservative, binder, stabilizing agent, etc. for drugs and includes, but is not limited to, proteins (e.g., serum albumin, etc.), amino acids (e.g., aspartic acid, glutamic acid, lysine, arginine, glycine, histidine, etc.), fatty acids and phospholipids (e.g., alkyl sulfonates, caprylate, etc.), surfactants (e.g., SDS, polysorbate, nonionic surfactant, etc.), saccharides (e.g., sucrose, maltose, trehalose, etc.) and polyols (e.g., mannitol, sorbitol, etc.). See, also, Remington's Pharmaceutical Sciences (1990) Mack Publishing Co., Easton, Pa., which is hereby incorporated by reference in its entirety.

[0067] “Framework region” or “FR” or “FR region” includes the aa residues that are part of the VR, but are not part of the CDRs (e.g., using the Kabat definition of CDRs). Therefore, a VR framework is between about 100-120 aas in length but includes only those aas outside of the CDRs. For the specific example of a heavy chain VR and for the CDRs as defined by Kabat et al., 1991, ibid., framework region 1 corresponds to the domain of the VR encompassing aas 1-30; framework region 2 corresponds to the domain of the VR encompassing aas 36-49; framework region 3 corresponds to the domain of the VR encompassing aas 66-94, and framework region 4 corresponds to the domain of the VR from aas 103 to the end of the VR. The framework regions for the light chain are similarly separated by each of the light chain VR CDRs. Similarly, using the definition of CDRs by Chothia et al. or McCallum et al. the framework region boundaries are separated by the respective CDR termini as described above. In preferred embodiments, the CDRs are as defined by Kabat.

[0068] “Full-length antibody” is an antibody that comprises one or more heavy chains and one or more light chains. Each heavy chain is comprised of a heavy chain VR (abbreviated herein as VH) and a heavy chain CR. The heavy chain CR is comprised of three domains CH1, CH2, and CH3, and optionally a fourth domain, CH4. Each light chain is comprised of a light chain VR (abbreviated herein as VL) and a light chain CR. The light chain CR is comprised of one domain, CL. The VH and VL regions can be further subdivided into regions of hypervariability, termed complementarity determining regions (CDR), interspersed with regions that are more conserved, termed framework regions (FR). Each VH and VL is typically composed of three CDRs and four FRs, arranged from amino-terminus to carboxy-terminus in the following order: FR1, CDR1, FR2, CDR2, FR3, CDR3, and FR4. Immunoglobulin proteins can be of any type class (e.g., IgG, IgE, IgM, IgD, IgA and IgY) or, subclass (e.g., IgG 1, IgG2, IgG 3, IgG4, IgA1 and IgA2) or subclass.

[0069] “Gly-Ser linker” or “Gly-Ser peptide” refers to a peptide that consists of glycine and serine residues. An exemplary Gly-Ser peptide comprises the aa sequence (Gly₄Ser)n (SEQ ID NO:395), wherein n=1, 2, 3, 4, 5, 6, 7, 8, 9, 10, 11, 12, 13, 14, 15, 16, 17, 18, 19, 20 or more. In certain embodiments, n is a number between 1 and 5, n is a number between 6 and 10, n is a number between 11 and 15, n is a number between 16 and 20, n is a number between 21 and 25, or n is a number between 26 and 30.

[0070] “Heavy chain immunoglobulin CR” or “HC Ig CR” may comprise a CH1 domain and an Fc region, which Fc region may comprise a hinge, a CH2 domain, a CH3 domain and/or a CH4 domain. A light chain immunoglobulin CR may comprise a CL domain.

[0071] “Hinge” or “hinge region” or “hinge domain” refers to the flexible portion of a heavy chain located between the CH1 domain and the CH2 domain. It is approximately 25 aas long, and is divided into an “upper hinge,” a “middle hinge,” and a “lower hinge.” A hinge may be a naturally occurring hinge, or a naturally occurring hinge in which one or more aas have been substituted, added or deleted, provided that the hinge has the desired biological properties. A desired biological activity may be a natural biological activity, an enhanced biological activity or a reduced biological activity relative to the naturally occurring sequence.

[0072] “IC₅₀,” or “IC50” refers to the concentration of a molecule, e.g., a PBA, that provides a 50% inhibition of a maximal activity (e.g., a response to a stimulus or a constitutive activity), i.e., a concentration that reduces the activity to a level halfway between the maximal activity and the baseline. The IC₅₀ value may be converted to an absolute inhibition constant (Ki) using, e.g., the Cheng-Prusoff equation. In a system that is inhibited by a binding agent, such as an antibody or a bispecific binding protein provided herein, the IC₅₀ may be indistinguishable from the EC₅₀.

[0073] “IGF-1R” or “IGF1R” refers to the receptor for insulin-like growth factor 1 (IGF-1, formerly known as somatomedin C). IGF-1R also binds to, and is activated by, insulin-like growth factor 2 (IGF-2). IGF1-R is a receptor tyrosine kinase, which upon activation by IGF-1 or IGF-2 is auto-phosphorylated. The aa sequence of human IGF-1R precursor is provided at Genbank Accession No. NP_000866 and is assigned Gene ID: 3480.

[0074] “IgG-(scFv)₂” indicates a tetravalent PBA consisting of an IgG having two N-terminal Fab binding sites each comprised of an IgG heavy chain and an IgG light chain, wherein the C-terminus of each heavy chain is linked to an scFv having a binding site comprised of a VH domain and a VL domain. When the immunoglobulin CRs are those of an IgG1, the PBA is referred to as an “IgG1-(scFv)₂.” Exemplary IgG1-(scFv)₂ PBAs are those where the four binding sites comprise two essentially identical anti-IGF-1R binding sites and two essentially identical anti-ErbB3 binding sites. Certain tetravalent PBAs described below and in U.S. Pat. No. 8,476,409 each comprise two joined essentially identical subunits, each subunit comprising a heavy and a light chain that are disulfide bonded to each other, e.g., M7-G1-M78 (SEQ ID NO:284 and SEQ ID NO:262), P4-G1-M1.3 (SEQ ID NO:226 and SEQ ID NO:204), and P4-G1-C8 (SEQ ID NO:222 and SEQ ID NO:204), are exemplary embodiments of such IgG1-(scFv)₂ proteins.

[0075] “Immunoglobulin CR” or “Ig CR” refers to the parts of an immunoglobulin, (i.e., an antibody,) outside of its variable domains. In certain embodiments, an immunoglobulin CR comprises a “heavy chain immunoglobulin CR” and a “light chain immunoglobulin CR.”

[0076] “Inhibition” of a biological activity by a binding protein refers to any reproducibly detectable decrease in biological activity mediated by the binding protein. In some embodiments, inhibition provides a statistically significant decrease in biological activity, e.g., a decrease of about 5%, 10%, 20%, 30%, 40%, 50%, 60%, 70%, 80%, 90%, or 100% in biological activity relative to the biological activity determined in the absence of the binding protein.

[0077] “Isolated,” in reference to polynucleotides, polypeptides or proteins, means that the polynucleotide, polypeptide or protein is substantially removed from polynucleotides, polypeptides, proteins or other macromolecules with which it, or its analogues, occurs in nature. Although the term “isolated” is not intended to require a specific degree of purity, typically, the protein will be at least about 75% pure, more preferably at least about 80% pure, more preferably at least about 85% pure, more preferably at least about 90% pure, more preferably still at least about 95% pure, and most preferably at least about 99% pure.

[0078] “Kabat” in conjunction with designation of immunoglobulin aa sequence positions indicates that aa positions in a light chain CR (e.g., CL domain) are numbered according to the Kabat index numbering system (see Kabat et al., 1991., op. cit.).

[0079] “Linked to” refers to direct or indirect linkage or connection of, in context, aas or nucleotides. An “indirect linkage” refers to a linkage that is mediated through a linker or a domain, comprising, e.g., one or more aas or nucleotides. A “direct linkage” or “linked directly” when referring to two polypeptide segments refers to the presence of covalent bond between the two polypeptide segments, e.g., the two polypeptide segments are joined contiguously without intervening sequences.

[0080] “Linker” refers to one or more aas connecting two domains or regions together. A linker may be flexible to allow the domains being connected by the linker to form a proper three dimensional structure thereby allowing them to have the required biological activity. A linker connecting the VH and the VL of an scFv is referred to herein as an “scFv linker.” A linker connecting the N-terminus of a VH domain or the C-terminus of the CH3 domain to a second VH domain, e.g., that of an scFv is referred to as a “connecting linker.”

[0081] “Module” refers to a structurally and/or functionally distinct part of a PBA, such a binding site (e.g., an scFv domain or a Fab domain) and the Ig constant domain. Modules provided herein can be rearranged (by recombining sequences encoding them, either by recombining nucleic acids or by complete or fractional de novo synthesis of new polynucleotides) in numerous combinations with other modules to produce a wide variety of PBAs, e.g., as disclosed herein. For example, an “SF” module refers to the binding site “SF,” i.e., comprising at least the CDRs of the SF VH and SF VL domains. A “C8” module refers to the binding site “C8.”

[0082] “Patient,” “patients,” “subject, or “subjects” refers to one or more human or non-human animals having one or more conditions treatable by the compositions described in the instant application. In some embodiments, the patient may have one or more types of cancer.

[0083] “PBA” refers to a polyvalent bispecific antibody, an artificial hybrid protein comprising at least two different binding moieties or domains and thus at least two different binding sites (e.g., two different antibody binding sites), wherein one or more of the pluralities of the binding sites are covalently linked, e.g., via peptide bonds, to each other. One PBA described herein is an anti-IGF-1R+anti-ErbB3 PBA, which is a polyvalent bispecific antibody that comprises one or more first binding sites binding specifically to an IGF-1R protein, e.g., a human IGF-1R protein, and one or more second binding sites binding specifically to an ErbB3 protein, e.g., a human ErbB3 protein. An anti-IGF-1R+anti-ErbB3 PBA is so named regardless of the relative orientations of the anti-IGF-1R and anti-ErbB3 binding sites in the molecule, whereas when the PBA name comprises two antigens separated by a slash (/) the antigen to the left of the slash is amino terminal to the antigen tot the right of the slash. A PBA may be a bivalent binding protein, a trivalent binding protein, a tetravalent binding protein or a binding protein with more than 4 binding sites. An exemplary PBA is a tetravalent bispecific antibody, i.e., an antibody that has 4 binding sites, but binds to only two different antigens or epitopes. Exemplary bispecific antibodies are tetravalent “anti-IGF-1R/anti-ErbB3” PBAs and “anti-ErbB3/anti-IGF-1R” PBAs. Typically the N-terminal binding sites of a tetravalent PBA are Fabs and the C-terminal binding sites are scFvs.

[0084] “Percent identical” or “% identical” refers to two or more nucleic acid or polypeptide sequences or subsequences that are the same (100% identical) or have a specified percentage of nucleotide or aa residues that are the same, when the two sequences are aligned for maximum correspondence and compared. To align for maximum correspondence, gaps may be introduced into one of the sequences being compared. The aa residues or nucleotides at corresponding positions are then compared and quantified. When a position in the first sequence is occupied by the same residue as the corresponding position in the second sequence, then the sequences are identical at that position. The percent identity between the two sequences is a function of the number of identical positions shared by the sequences (e.g., % identity=# of identical positions/total # of positions (e.g., overlapping positions)×100). In certain embodiments, the two sequences are the same length. The determination that one sequence is a measured % identical with another sequence can be determined using a mathematical algorithm. A non-limiting example of a mathematical algorithm utilized for such comparison of two sequences is incorporated in the ALIGN program (version 2.0) which is part of the GCG sequence alignment software package. When utilizing the ALIGN program e.g., for comparing aa sequences, a PAM120 weight residue table, a gap length penalty of 12, and a gap penalty of 4 may be used. Additional algorithms for sequence analysis are well known in the art and many are available online.

[0085] “Pharmaceutical combination” or “pharmaceutical composition” refers to a product that results from the mixing or combining of more than one active ingredient and includes both fixed and non-fixed combinations of the active ingredients. The term “fixed combination” means that the active ingredients, e.g., a compound useful in the disclosed methods and a co-agent, are both administered to a patient simultaneously in the form of a single entity or dosage. The term “non-fixed combination” means that the active ingredients, e.g., a compound useful in the disclosed methods and a co-agent, are both administered to a patient as separate entities either simultaneously, concurrently or sequentially with no specific time limits, wherein such administration provides therapeutically effective levels of the two compounds in the body of the patient. The latter also applies to cocktail therapy, e.g., the administration of three or more active ingredients.

[0086] “Portion” or “fragment” (e.g., of a domain) of a reference moiety refers to a discrete part of the whole reference moiety (e.g., domain, e.g., a naturally occurring domain) that is at least, or at most 10% 20%, 30%, 40%, 50%, 60%, 70%, 80%, 90%, 95%, 98%, or 99% of the size of the reference moiety.

[0087] “Preferentially binds” or “preferentially binding” refers to the specific binding of one binding agent to a target epitope or target epitopes as stronger than the specific binding of a second binding agent to the same target epitope or target epitopes.

[0088] “scFv linker” refers to a peptide or polypeptide domain interposed between the VL and VH domains of an scFv. scFv linkers preferably allow orientation of the VL and VH domains in a antigen binding conformation. In one embodiment, an scFv linker comprises or consists of a peptide or polypeptide linker that only comprises glycines and serines (a “Gly-Ser linker”). In certain embodiments, an scFv linker comprises a disulfide bond.

[0089] “scFv protein” refers to a binding protein that consists of a single polypeptide comprising one light chain variable domain (VL), and one heavy chain variable domain (VH), wherein each variable domain is derived from the same or different antibodies. scFv proteins typically comprise an scFv linker interposed between the VH domain and the VL domain. ScFv proteins are known in the art and are described, e.g., in U.S. Pat. No. 5,892,019.

[0090] “Similarity” or “percent similarity” in the context of two or more polypeptide sequences, refer to two or more sequences or subsequences that have a specified percentage of aa residues that are the same or conservatively substituted when compared and aligned for maximum correspondence. By way of example, a first aa sequence can be considered similar to a second aa sequence when the first aa sequence is at least 50%, 60%, 70%, 75%, 80%, 90%, or even 95% identical, or conservatively substituted, to the second aa sequence when compared to an equal number of aas as the number contained in the first sequence, or when compared to an alignment of polypeptides that has been aligned by a computer similarity program known in the art. These terms are also applicable to two or more polynucleotide sequences.

[0091] “Small molecule immunomodulator” is a small molecule agent that effects one or more functions of the immune system.

[0092] “Specific binding,” “specifically binds,” “selective binding,” and “selectively binds,” as well as “immunospecifically binds” “binds specifically” “binds selectively,” are terms that may be used when referring to the binding of a binding site to its target epitope or a combination of binding sites to their target epitopes, means that the binding site(s) exhibit(s) immunospecific binding to the target epitope(s).

[0093] A binding site that binds specifically to an epitope exhibits appreciable affinity for a target epitope and, generally, does not exhibit cross-reactivity with other epitopes in that it does not exhibit appreciable affinity to any unrelated epitope and preferably does not exhibit affinity for any unrelated epitope that is equal to, greater than, or within two orders of magnitude lower than the affinity for the target epitope. “Appreciable” or preferred binding includes binding with a dissociation constant (Kd) of 10⁻⁸, 10⁻⁹ M, 10⁻¹⁰, 10⁻¹¹, 10⁻¹² M, 10⁻¹³ M or an even lower Kd value. Note that lower values for Kd (dissociation constant) indicate higher binding affinity, thus a Kd of 10⁻⁷ is a higher Kd value than a Kd of 10⁻⁸, but indicates a lower binding affinity than a Kd of 10⁻⁸). Dissociation constants with values of about 10⁻⁷ M, and even as low as about 10⁻⁸ M, are at the high end of dissociation constants suitable for therapeutic antibodies. Binding affinities may be indicated by a range of dissociation constants, for example, 10⁻⁶ to 10⁻¹² M, 10⁻⁷ to 10⁻¹² M, 10⁻⁸ to 10⁻¹² M or better (i.e., or lower value dissociation constant). Dissociation constants in the nanomolar (10⁻⁹ M) to picomolar (10⁻¹² M) range or lower are typically most useful for therapeutic antibodies. Suitable dissociation constants are Kds of 50 nM or less (i.e., a binding affinity of 50 nM or higher—e.g., a Kd of 45 nM) or Kds of 40 nM, 30 nM, 20 nM, 10 nM, 1 nm, 100 pM, 10 pM or 1 pM or less. Specific or selective binding can be determined according to any art-recognized means for determining such binding, including, for example, according to Scatchard analysis and/or competitive binding assays.

[0094] Methods of Treatment

[0095] In one aspect, provided herein are methods of treating cancer (e.g., treating a patient having a solid tumor) comprising administering a therapeutically effective amount of an anti-IGF-1R and anti-ErbB3 antibody, preferably istiratumab (MM-141), alone or in combination with an immunomodulatory therapeutic agent.

[0096] In some embodiments, the immunomodulatory therapeutic agent is a human cytotoxic T-lymphocyte antigen 4 (CTLA-4)-blocking antibody. The immunomodulatory therapeutic agent can be indicated for the treatment of unresectable or metastatic melanoma. In some embodiments, cancer can be treated by administering istiratumab in combination with a CTLA-4 blocking antibody to a human patient diagnosed with cancer, such as cancer having a solid tumor. In some embodiments, istiratumab is administered alone or in combination with a CTLA-4 blocking antibody (e.g., ipilumumab) for the treatment of patients with unresectable or metastatic melanoma.

[0097] Preferably, the human patient does not have an auto-immune condition raising unacceptable risks of medically undesirable complications from the administration of istiratumab alone or in combination with the CTLA-4 blocking antibody. For example, patients having one or more of the following can be excluded from receiving a combination of istiratumab and the CTLA-4 blocking antibody: active autoimmune disease or those receiving systemic immunosuppression for organ transplantation. In some embodiments, patients can also be excluded from receiving the antineoplastic therapy who have a relevant medical history including adverse reactions or conditions such as myocarditis, angiopathy, temporal arteritis, vasculitis, polymyalgia rheumatica, conjunctivitis, blepharitis, episcleritis, scleritis, leukocytoclastic vasculitis, erythema multiforme, psoriasis, pancreatitis, arthritis, and autoimmune thyroiditis.

[0098] In some embodiments, the methods of treating cancer comprise the administration of an antineoplastic therapy, wherein the antineoplastic therapy consists of the administration of a therapeutically effective dose of istiratumab (e.g., 40 mg/kg or 2.8 grams fixed dose, or a reduced fixed dose according to the table below) once every two weeks, alone or in combination with the anti CTLA-4 antibody (e.g., 3 mg/kg ipilimumab as an intravenous infusion over 90 minutes, once every three weeks). In some embodiments, istiratumab is administered as an intravenous infusion, for example over a 90-120 minute time period (e.g., a 90-minute infusion once every two weeks or a 120-minute infusion once every two weeks, or a 120 minute infusion in the first dose, followed by a 90 minute infusion in subsequent doses). In some embodiments, the antineoplastic therapy includes or consists of one or more reductions in the dose of istiratumab as indicated in Table 2, administered alone or in combination with the PD-1 blocking antibody. In some embodiments, the antineoplastic therapy includes or consists of one or more reductions in the dose of istiratumab as indicated in Table 2, administered alone or in combination with the PD-L1 blocking antibody. In some embodiments, the antineoplastic therapy includes or consists of one or more reductions in the dose of istiratumab as indicated in Table 2, administered alone or in combination with the CTLA4 blocking antibody.

TABLE 2
Istiratumab Dose Schedule

| Dose Level | Dose | Frequency |
|---|---|---|
| Full dose | 2.8 g (10 vials) | Q2W |
| 1^{st} dose reduction | 2.24 g (8 vials) | Q2W |
| 2^{nd} dose reduction | 1.96 g (7 vials) | Q2W |
| If additional dose reductions are | Discontinue | Discontinue |
| required | | |

[0099] For example, in some embodiments, the method comprises administering an antineoplastic therapy to a human patient diagnosed with cancer, where the antineoplastic therapy consists of the administration of 2.8, 2.24 or 1.96 g of istiratumab to the patient (e.g., once every two weeks), where the human patient does not have a diagnosed active auto-immune disease. In another embodiment, the method comprises administering an antineoplastic therapy to a human patient diagnosed with cancer, where the antineoplastic therapy consists of the administration of 2.8, 2.24 or 1.96 g of istiratumab once every two weeks to the patient in combination with 3 mg/kg ipilimumab once every three weeks for a total of up to four doses of ipilumumab, where the human patient is diagnosed with unresectable or metastatic melanoma. Alternatively, in some embodiments, the antineoplastic therapy is administered once every week, and consists of the administration of istiratumab at a therapeutically effective dose of 6 mg/kg, 12 mg/kg or 20 mg/kg per dose.

[0100] In another aspect, provided herein are methods of treating cancer (e.g., treating a patient having a solid tumor) comprising the administration of a therapeutically effective amount of an anti-IGF-1R and anti-ErbB3 antibody, preferably istiratumab (MM-141), alone or in combination with a human programmed death receptor-1, or PD-1, blocking antibody. In some embodiments, the cancer can be treated by administration of istiratumab in combination with a PD-1 blocking antibody to a human patient (e.g., a patient diagnosed with a solid tumor). In some embodiments, istiratumab is administered alone or in combination with a PD-1 blocking antibody (e.g., nivolumab) for the treatment of patients with unresectable or metastatic melanoma and disease progression following ipilimumab and, if BRAF V600 mutation positive, a BRAF inhibitor.

[0101] In one embodiment, the human patient does not have an active auto-immune condition raising unacceptable risks of medically undesirable complications from the administration of istiratumab alone or in combination with the PD-1 blocking antibody. For example, in some embodiments, patients having one or more of the following can be excluded from receiving a combination of istiratumab and the PD-1 blocking antibody: patients with a diagnosed autoimmune disease, patients with prior ipilimumab-related Grade 4 adverse reactions (except for endocrinopathies) or Grade 3 ipilimumab-related adverse reactions that had not resolved or were inadequately controlled within 12 weeks of the initiating event, and patients with a condition requiring chronic systemic treatment with corticosteroids (>10 mg daily prednisone equivalent) or other immunosuppressive medications, a positive test for hepatitis B or C, and a history of HIV. In some embodiments, patients are excluded from therapy who have a medical history included immune-mediated adverse reactions such as pancreatitis, uveitis, demyelination, autoimmune neuropathy, adrenal insufficiency, and facial and abducens nerve paresis.

[0102] In some embodiments, antineoplastic therapy is administered once every two weeks, wherein the therapy consists of administering a therapeutically effective dose of istiratumab (e.g., 40 mg/kg or 2.8 grams fixed dose), alone or in combination with an anti PD-1 antibody (e.g., 3 mg/kg nivolumab as an intravenous infusion over 60 minutes). In some embodiments, istiratumab is administered as an intravenous infusion, for example over a 90-120 minute time period (e.g., a 90-minute infusion once every two weeks or a 120-minute infusion once every two weeks, or a 120 minute infusion in the first dose, followed by a 90 minute infusion in subsequent doses). In some embodiments, the antineoplastic therapy includes or consists of one or more reductions in the dose of istiratumab as indicated in Table 2, administered alone or in combination with the PD-1 blocking antibody.

[0103] In some embodiments, the method comprises administering an antineoplastic therapy once every two weeks to a human patient diagnosed with cancer, wherein the antineoplastic therapy consists of the administration of 2.8, 2.24 or 1.96 g of istiratumab to the patient, where the human patient does not have a diagnosed auto-immune disease. In another embodiment, the method comprises administering an antineoplastic therapy once every two weeks to a human patient diagnosed with cancer, where the antineoplastic therapy consists of the administration of 2.8, 2.24 or 1.96 g of istiratumab to the patient in combination with 3 mg/kg nivolumab, where the human patient is diagnosed with unresectable or metastatic melanoma and disease progression following ipilumumab and, if BRAF V600 mutation positive, a BRAF inhibitor. Alternatively, the antineoplastic therapy is administered once every week, and consists of the administration of istiratumab at a therapeutically effective dose of 6 mg/kg, 12 mg/kg or 20 mg/kg per dose.

[0104] In some embodiments, the antineoplastic therapy is administered once every two weeks to a patient with cancer disease progression after prior treatment with ipilimumab (e.g., melanoma disease progression), where the antineoplastic therapy consists of administration of a therapeutically effective dose of istiratumab (e.g., 40 mg/kg or 2.8 grams fixed dose), alone or in combination with the anti PD-1 antibody (e.g., 3 mg/kg nivolumab as an intravenous infusion over 60 minutes). Istiratumab can be administered as an intravenous infusion, for example over a 90-120 minute time period (e.g., a 90-minute infusion once every two weeks or a 120-minute infusion once every two weeks, or a 120 minute infusion in the first dose, followed by a 90 minute infusion in subsequent doses). In some embodiments, the antineoplastic therapy includes or consists of one or more reductions in the dose of istiratumab as indicated in Table 2, administered alone or in combination with the PD-1 blocking antibody.

[0105] In some embodiments, the immunomodulatory therapeutic agent is a programmed cell death-ligand 1 (PD-L1) blocking antibody. The immunomodulatory therapeutic agent can be indicated for the treatment of locally advanced or metastatic urothelial carcinoma, including patients with disease progression during or following platinum-containing chemotherapy and patients having disease progression within 12 months of neoadjuvant or adjuvant treatment with platinum-containing chemotherapy. In some embodiments, cancer is treated by administration of istiratumab in combination with a PD-L1 blocking antibody to a human patient diagnosed with cancer, such as cancer having a solid tumor. In some embodiments, the istiratumab is administered alone or in combination with a PD-L1 blocking antibody (e.g., atezoluzumab) for the treatment of patients with unresectable or metastatic melanoma.

[0106] Preferably, the human patient does not have an auto-immune condition raising unacceptable risks of medically undesirable complications from the administration of istiratumab alone or in combination with the PD-L1 blocking antibody. For example, the patients having one or more of the following can be excluded from receiving a combination of istiratumab and the PD-L1 blocking antibody: active autoimmune disease or those receiving systemic immunosuppression for organ transplantation. In some embodiments, patients who have a relevant medical history can also be excluded from receiving the antineoplastic therapy, including patients who have/had: a history of autoimmune disease, active or corticosteroid-dependent brain metastases, administration of a live, attenuated vaccine within 28 days prior to treatment, or administration of systemic immunostimulatory agents or systemic immunosuppressive medications.

[0107] In some embodiments, the method of treating cancer comprises administration of an antineoplastic therapy, wherein the antineoplastic therapy comprises or consists of administration of a therapeutically effective dose of istiratumab (e.g., 40 mg/kg or 2.8 grams fixed dose) once every two weeks, alone or in combination with the anti PD-L1 antibody (e.g., 1200 mg atezolizumab once every three weeks). Istiratumab can be administered as an intravenous infusion, for example over a 90-120 minute time period (e.g., a 90-minute infusion once every two weeks or a 120-minute infusion once every two weeks, or a 120 minute infusion in the first dose, followed by a 90 minute infusion in subsequent doses). In some embodiments, the antineoplastic therapy includes or consists of one or more reductions in the dose of istiratumab as indicated in Table 2, administered alone or in combination with the PD-L1 blocking antibody.

[0108] Agents that Impede Regulatory T Cell Activity

[0109] Agents that impede regulatory T cell activity (Tregs) include small molecule immunomodulatory agents, radiation, anticancer vaccines, and immunomodulatory antibodies that do not bind to human IGF-1. Tregs, formerly known as suppressor T cells, are a subpopulation of T cells which modulate the immune system, suppress immune responses against other cells and maintain tolerance to self-antigens. Generally, these cells suppress or downregulate the induction and proliferation of effector T cells. Therefore, when regulatory T cell activity is impeded, the immune response suppressive activities of these cells will be lessened or removed.

[0110] Immunomodulatory Antibodies

[0111] In some embodiments, a therapeutically-effective dose of istiratumab (MM-141) is administered in combination with an immunomodulatory antibody. As described above, the immunomodulatory antibody is preferably selected from the group consisting of: a human cytotoxic T-lymphocyte antigen 4 (CTLA-4)-blocking antibody such as ipilimumab, and a human programmed death receptor-1 (PD-1) antibody such as nivolumab. The immunomodulatory agent can be indicated for the safe and effective treatment of unresectable or metastatic melanoma alone or in combination with istiratumab.

[0112] Additional examples of immunomodulatory antibodies that do not bind IGF-1 include an immunomodulatory antibody that may be selected from, but is not limited to, the group consisting of (a) an agonistic anti-receptor antibody that immunospecifically binds human OX40, CD40, GITR, CD27, ICOS, or 4-1BB; (b) an antagonistic anti-receptor antibody that immunospecifically binds human CTLA-4 (cyctotoxic T-lymphocyte-associated protein 4, also known as CD152), PD-1 (programmed cell death protein 1, also known as CD279), PD-L1 (programmed death-ligand 1, also known as CD274 or B7-H1), TIM-3, BTLA, VISTA, LAG-3, KIR, CD47, CD25, B7-H3, or B7-H4; and (c) an anti-ligand antibody that blocks the function of IL-6, IL-10, TGFβ, angiopoetin-2, VEGF, IL-17, IL-23, or TNFalpha. In one embodiment, the second agent is an anti-PD-1 antibody, an anti-PD-L1 antibody, or an anti-CTLA-4 antibody. In another embodiment, the second agent is atezolizumab, durvalumab, or avelumab. In another embodiment, the second agent is selected from the group consisting of nivolumab, pembrolizumab, and pidilizumab. In another embodiment, the second agent is ipilimumab or tremelimumab. In another embodiment, the second agent is lirilumab.

[0113] Immunomodulatory antibodies that do not bind to human IGF-1 are further detailed in FIGS. 17A-17C.

[0114] Anti-Cancer Vaccines

[0115] In one aspect, the therapeutic combinations provided herein that impede regulatory T cell activity are anticancer vaccines. In some embodiments, the anticancer vaccine is selected from, but is not limited to, the group consisting of OncoVex, MAGE-A3, PROSTVAC, GVAX, CDX110, CDX1307, CDX1401, CV9104, BIOVAXID, IMA 901, and ADXS11-001.

[0116] Polyvalent Bispecific (Anti-IGF-1R and Anti-ErbB3) Antibodies

[0117] In certain embodiments, the bispecific (anti-IGF-1R and anti-ErbB3) antibody for use in the methods disclosed herein is istiratumab (MM-141). In addition to U.S. Pat. No. 8,476,409, referred to above, disclosures regarding bispecific antibodies useful in the methods disclosed herein may be found in U.S. Patent Publication No. 2012-0244163; U.S. Patent Publication No. 2015-0231219 (also see WIPO Publication No. WO 2013/152034); and in WIPO Publication No. WO 2015/130554. Further discussion of bispecific antibodies for use in the disclosed methods are described below. Provided herein are polyvalent bispecific antibodies (“PBAs”), which may be isolated monoclonal antibodies. Exemplary PBAs comprise at least one anti-IGF-1R binding site and at least one anti-ErbB3 binding site or at least two anti-IGF-1R binding sites and at least two anti-ErbB3 binding sites. In a preferred embodiment, the anti-IGF-1R binding site binds specifically to a human IGF-1R and the anti-ErbB3 binding site binds specifically to human ErbB3. In certain embodiments, the PBA comprises two heavy-light chain pairs that associate with each other to form a single protein, wherein each heavy-light chain pair comprises an anti-IGF-1R binding site and an anti-ErbB3 binding site. In certain embodiments, the anti-IGF-1R binding site and the anti-ErbB3 binding site of a first heavy-light chain pair are connected through an immunoglobulin CR that associates with the immunoglobulin CR of another heavy-light chain pair (e.g., by disulfide bonds) to form, e.g., a single IgG-like protein. A preferred PBA as described herein has advantageous properties, such as the ability to inhibit tumor cell proliferation and to reduce or stabilize tumor growth equivalently to or more potently than either its isolated anti-IGF-1R binding moiety or its isolated anti-ErbB3 binding moiety, and in certain embodiments, the ability to inhibit either or both of tumor invasiveness and tumor metastasis. An exemplary PBA described herein can inhibit either or both of IGF-1R and ErbB3 mediated signal transduction, such as IGF-1R, ErbB3 and AKT phosphorylation, equivalently to or more potently than either its isolated anti-IGF-1R binding moiety or its isolated anti-ErbB3 binding moiety. An exemplary PBA will (i) inhibit growth of tumor cells, e.g., by at least 10%, 20%, 30%, 40%, 50%, 60%, 70%, 80%, 90% or more; or (ii) inhibit IGF-1r, ErbB3 or Akt phosphorylation, e.g., by at least 10%, 20%, 30%, 40%, 50%, 60%, 70%, 80%, 90% or more, e.g., to a similar extent or more potently than either its isolated anti-IGF-1R binding moiety or its isolated anti-ErbB3 binding moiety, or both (i) and (ii). An exemplary PBA will (iii) be stable, e.g., be at least 80% monomeric in a solution after 1, 2, 3, 4, 5 or more days at 4° C., room temperature or 37° C., or (iv) have a Tm (e.g., as determined by DSF) of at least 50° C., 55° C., 60° C., 65° C. or more, or both (iii) and (iv).

[0118] The methods disclosed herein may comprise the use or administration of one or more polyvalent bispecific antibodies (PBA), which antibodies are proteins comprising two pairs of polypeptide chains, each pair of said two pairs comprising a heavy chain joined to a light chain by at least one heavy-light chain bond; wherein (a) each pair comprises at least one anti-IGF-1R binding site and at least one anti-ErbB3 binding site; and (b) each pair comprises a first binding site that comprises an N-terminal portion of the heavy chain of the PBA and an N-terminal portion of the light chain of the PBA, and a second binding site that is a C-terminal scFv that is entirely comprised by the heavy chain of the PBA, said C-terminal scFv containing a heavy chain VR joined to a light chain VR by an scFv linker; and the anti-IGF-1R binding site is linked to the anti-ErbB3 binding site through a heavy chain immunoglobulin (HC Ig) constant region (CR) comprised by the heavy chain of the PBA, and the two pairs are conjoined by at least one bond between the HC Ig CRs of each pair. In preferred embodiments, the anti-IGF-1R binding site comprises a heavy chain variable (VH) domain comprising a set of three VH Complementarity Determining Regions (CDRs) comprising either (a) VHCDR1 (aa numbers 26-35), VHCDR2 (aa numbers 51-66), and VHCDR3 (aa numbers 99-111), of a heavy chain having an aa sequence comprising the aa sequence of (set forth in) a SEQ ID NO selected from the group consisting of SEQ ID NO: 1, SEQ ID NOs:8-31 and SEQ ID NOs:384-385; or (b) a set of three VH Complementarity Determining Regions (CDRs) comprising VHCDR1 comprising SEQ ID NO:302, VHCDR2 comprising SEQ ID NO:303 and VHCDR3 comprising SEQ ID NO:304, and a light chain variable (VL) domain comprising a set of three VLCDRs comprising either (c) VLCDR1 (aa numbers 24-34), VLCDR2 (aa numbers 50-56) and VLCDR3 (aa numbers 89-97) of a light chain having an aa sequence comprising the aa sequence of a SEQ ID NO selected from the group consisting of SEQ ID NOs:2-3, SEQ ID NOs:32-133, and SEQ ID NOs:386-387; or (d) a set of three VLCDRs comprising VLCDR1 comprising SEQ ID NO:305, VLCDR2 comprising SEQ ID NO:306 and VLCDR3 comprising SEQ ID NO:307 or SEQ ID NO:308, and each CDR further comprising an amino terminus and a carboxy terminus, wherein the CDRs of each set of CDRs are arranged in the corresponding heavy or light chain in a linear amino to carboxy order of CDR1, CDR2 and CDR3, or wherein the sequences of VHCDR1, VHCDR2 and VHCDR3 comprise variable aas, and the sequences of VLCDR1, VLCDR2 and VLCDR3 comprise variable aas, with the proviso that the PBA (i) does not comprise both the anti-IGF-1R SF module and the anti-ErbB3 C8 module; or (ii) comprises at least one CDR or FR that differs in one or more aas from a CDR or FR, respectively, of the SF or C8 module. In certain embodiments, the anti-ErbB3 binding site comprises a VH domain comprising a set of three VH CDRs comprising either (e) VHCDR1 (aa numbers 26-35), VHCDR2 (aa numbers 51-66) and VHCDR3 (aa numbers 99-111) of a heavy chain having an aa sequence comprising the aa sequence of a SEQ ID NO selected from the group consisting of SEQ ID NOs:4-5, SEQ ID NOs: 134-165, and SEQ ID NO:388, or (f) a set of three VH CDRs comprising VHCDR1 comprising SEQ ID NO:309, VHCDR2 comprising SEQ ID NO:310 and VHCDR3 comprising SEQ ID NO:311, and a light chain variable (VL) domain comprising a set of three VLCDRs comprising either (g) VLCDR1 (aa numbers 23-33), VLCDR2 (aa numbers 49-55) and VLCDR3 (aa numbers 88-98), of a light chain having an aa sequence comprising the aa sequence of a SEQ ID NO selected from the group consisting of SEQ ID NOs:6-7 and SEQ ID NOs: 166-200; or (h) a light chain variable (VL) domain comprising a set of three VLCDRs comprising VLCDR1 comprising SEQ ID NO:312, VLCDR2 comprising SEQ ID NO:313 and VLCDR3 comprising SEQ ID NO:314 or SEQ ID NO:315, and each CDR further comprises an amino terminus and a carboxy terminus, wherein the CDRs of each set of CDRs are arranged in the antibody in a linear amino to carboxy order of CDR1, CDR2 and CDR3, or wherein the sequences of the VHCDR1, VHCDR2 and VHCDR3 comprise variable aas, and the sequences of the VLCDR1, VLCDR2 and VLCDR3 comprise variable aas, wherein the PBA (i) does not comprise both the anti-IGF-1R module comprising a light chain comprising SEQ ID NO:35 and a heavy chain comprising SEQ ID NO:11 and the b) an anti-ErbB3 C8 module comprising a light chain comprising SEQ ID NO: 175 and a heavy chain comprising SEQ ID NO: 145. In certain embodiments, the anti-IGF-1R VLCDR3 comprises SEQ ID NO:308 or the anti-ErbB3 VLCDR3 comprises SEQ ID NO:315. In certain embodiments, the two pairs of polypeptide chains are have essentially identical sequences. At least one of at least one bonds between the HC Ig CRs bonds is a disulfide bond and may be a disulfide bond or a van der Waals bond or at least one of said at least one heavy-light chain bonds is a disulfide bond and may be a disulfide bond or a van der Waals bond. In certain embodiments, the anti-ErbB3 binding site is the C-terminal scFv and in certain embodiments, the anti-IGF-1R binding site is the C-terminal scFv. The anti-IGF-1R binding site, the HC Ig CR and the anti-ErbB3 binding site of a PBA may comprise the heavy chain of that pair, which is comprised by a single, contiguous polypeptide chain.

[0119] The one or more PBA may (i) inhibit growth of tumor cells in vitro at a concentration of 1 μM or less, or 100 nM or less, or 10 nM or less, or 1 nM or less, or ii) inhibits either or both of heregulin and IGF1 induced signal transduction with an IC50 of 10 nM or less or 1 nM or less or 100 pM or less, or a maximal percent inhibition of at least 70% or at least 80% or at least 90%, as indicated by inhibition of phosphorylation of either or both of pErbB3 and pIGF-1R. Growth inhibition may be measured with a CTG assay in DU145 cells in culture. Inhibition of signal transduction may be determined in BxPC-3 cells in culture following stimulation with IGF-1 at 80 ng/ml and heregulin at 20 ng/ml for 15 minutes.

[0120] In certain embodiments, each HC Ig CR of a PBA comprises a CH3 domain that mediates conjunction with the CH3 domain of the other pair. Each HC Ig CR may also comprise a CH2 domain, a hinge, and a CH1 domain. In certain embodiments, the CH1 domain of a PBA is linked at its C-terminus to the N-terminus of a hinge, which is linked at its C-terminus to the N-terminus of a CH2 domain, which is linked at its C-terminus to the N-terminus of a CH3 domain.

[0121] Each first binding site may comprise a first VH domain, and each CH1 domain of a PBA may be linked at its N-terminus to the C-terminus of the first VH domain. Each CH3 domain of a PBA may be linked at its C-terminus to the N-terminus of the scFv. Each CH3 domain of a PBA may be linked at its C terminus to the N-terminus of a connecting linker, which is linked at its C-terminus to the N-terminus of the scFv. Each light chain may comprise a first VL domain that associates with the first VH domain to form the first binding site. Each first VL domain may be linked at its C-terminus to the N-terminus of a CL domain. Each first binding site may be an anti-IGF-1R binding site and each scFv may be an anti-ErbB3 scFv. Each first binding site may be an anti-ErbB3 binding site and each scFv may be an anti-IGF-1R scFv. The HC Ig CR of a PBA may be an IgG CR, e.g., an IgG1 or IgG2 CR.

[0122] In certain embodiments, the anti-IGF-1R VHCDR1, VHCDR2, VHCDR3 of a PBA comprise the aa sequence of the corresponding CDRs of SEQ ID NO:8 and the anti-IGF-1R VLCDR1, VLCDR2 and VLCDR3 of the PBA comprise the aa sequence of the corresponding CDRs of SEQ ID NO:32. In certain embodiments, the anti-IGF-1R VHCDR1, VHCDR2, VHCDR3 of a PBA comprise the aa sequence of the corresponding CDRs of SEQ ID NO:9 and the anti-IGF-1R VLCDR1, VLCDR2 and VLCDR3 of the PBA comprise the aa sequence of the corresponding CDRs of SEQ ID NO:33. In certain embodiments, the anti-IGF-1R VHCDR1, VHCDR2, VHCDR3 of a PBA comprise the aa sequence of the corresponding CDRs of SEQ ID NO:10 and the anti-IGF-1R VLCDR1, VLCDR2 and VLCDR3 of the PBA comprise the aa sequence of the corresponding CDRs of SEQ ID NO:34. In certain embodiments, the anti-IGF-1R VHCDR1, VHCDR2, VHCDR3 of a PBA comprise the aa sequence of the corresponding CDRs of SEQ ID NO:11 and the anti-IGF-1R VLCDR1, VLCDR2 and VLCDR3 of the PBA comprise the aa sequence of the corresponding CDRs of SEQ ID NO:35. In certain embodiments, the anti-IGF-1R VHCDR1, VHCDR2, VHCDR3 of a PBA comprise the aa sequence of the corresponding CDRs of SEQ ID NO:8 and the anti-IGF-1R VLCDR1, VLCDR2 and VLCDR3 of the PBA comprise the aa sequence of the corresponding CDRs of SEQ ID NO:33. In certain embodiments, the anti-IGF-1R VHCDR1, VHCDR2, VHCDR3 of a PBA comprise the aa sequence of the corresponding CDRs of SEQ ID NO:10 and the anti-IGF-1R VLCDR1, VLCDR2 and VLCDR3 of the PBA comprise the aa sequence of the corresponding CDRs of SEQ ID NO:32.

[0123] In certain embodiments, the anti-ErbB3 VHCDR1, VHCDR2, VHCDR3 of a PBA comprise the aa sequence of the corresponding CDRs of SEQ ID NO:134 and the anti-ErbB3 VLCDR1, VLCDR2 and VLCDR3 of the PBA comprise the aa sequence of the corresponding CDRs of SEQ ID NO: 166. In certain embodiments, the anti-ErbB3 VHCDR1, VHCDR2, VHCDR3 of a PBA comprise the aa sequence of the corresponding CDRs of SEQ ID NO:135 and the anti-ErbB3 VLCDR1, VLCDR2 and VLCDR3 of the PBA comprise the aa sequence of the corresponding CDRs of SEQ ID NO:167. In certain embodiments, the anti-ErbB3 VHCDR1, VHCDR2, VHCDR3 of a PBA comprise the aa sequence of the corresponding CDRs of SEQ ID NO:136 and the anti-ErbB3 VLCDR1, VLCDR2 and VLCDR3 of the PBA comprise the aa sequence of the corresponding CDRs of SEQ ID NO: 168. In certain embodiments, the anti-ErbB3 VHCDR1, VHCDR2, VHCDR3 of a PBA comprise the aa sequence of the corresponding CDRs of SEQ ID NO:137 and the anti-ErbB3 VLCDR1, VLCDR2 and VLCDR3 of the PBA comprise the aa sequence of the corresponding CDRs of SEQ ID NO: 169. In certain embodiments, the anti-ErbB3 VHCDR1, VHCDR2, VHCDR3 of a PBA comprise the aa sequence of the corresponding CDRs of SEQ ID NO:138 and the anti-ErbB3 VLCDR1, VLCDR2 and VLCDR3 of the PBA comprise the aa sequence of the corresponding CDRs of SEQ ID NO: 170. In certain embodiments, the anti-ErbB3 VHCDR1, VHCDR2, VHCDR3 of a PBA comprise the aa sequence of the corresponding CDRs of SEQ ID NO:139 and the anti-ErbB3 VLCDR1, VLCDR2 and VLCDR3 of the PBA comprise the aa sequence of the corresponding CDRs of SEQ ID NO:171. In certain embodiments, the anti-ErbB3 VHCDR1, VHCDR2, VHCDR3 of a PBA comprise the aa sequence of the corresponding CDRs of SEQ ID NO: 140 and the anti-ErbB3 VLCDR1, VLCDR2 and VLCDR3 of the PBA comprise the aa sequence of the corresponding CDRs of SEQ ID NO:172. In certain embodiments, the anti-ErbB3 VHCDR1, VHCDR2, VHCDR3 of a PBA comprise the aa sequence of the corresponding CDRs of SEQ ID NO: 141 and the anti-ErbB3 VLCDR1, VLCDR2 and VLCDR3 of the PBA comprise the aa sequence of the corresponding CDRs of SEQ ID NOs: 173. In certain embodiments, the anti-ErbB3 VHCDR1, VHCDR2, VHCDR3 of a PBA comprise the aa sequence of the corresponding CDRs of SEQ ID NO: 142 and the anti-ErbB3 VLCDR1, VLCDR2 and VLCDR3 of the PBA comprise the aa sequence of the corresponding CDRs of SEQ ID NO:174. In certain embodiments, the anti-ErbB3 VHCDR1, VHCDR2, VHCDR3 of a PBA comprise the aa sequence of the corresponding CDRs of SEQ ID NO:143 and the anti-ErbB3 VLCDR1, VLCDR2 and VLCDR3 of the PBA comprise the aa sequence of the corresponding CDRs of SEQ ID NO: 175. In certain embodiments, the anti-ErbB3 VHCDR1, VHCDR2, VHCDR3 of a PBA comprise the aa sequence of the corresponding CDRs of SEQ ID NO:136 and the anti-ErbB3 VLCDR1, VLCDR2 and VLCDR3 of the PBA comprise the aa sequence of the corresponding CDRs of SEQ ID NO:169.

[0124] In certain embodiments, the anti-IGF-1R VHCDR1, VHCDR2, VHCDR3 of a PBA comprise the aa sequence of the corresponding CDRs of SEQ ID NO:8 and the anti-IGF-1R VLCDR1, VLCDR2 and VLCDR3 of the PBA comprise the aa sequence of the corresponding CDRs of SEQ ID NO:32; and (a) the anti-ErbB3 VHCDR1, VHCDR2, VHCDR3 of the PBA comprise the aa sequence of the corresponding CDRs of SEQ ID NO:134 and the anti-ErbB3 VLCDR1, VLCDR2 and VLCDR3 of the PBA comprise the aa sequence of the corresponding CDRs of SEQ ID NO: 166; or (b) the anti-ErbB3 VHCDR1, VHCDR2, VHCDR3 of the PBA comprise the aa sequence of the corresponding CDRs of SEQ ID NO:135 and the anti-ErbB3 VLCDR1, VLCDR2 and VLCDR3 of the PBA comprise the aa sequence of the corresponding CDRs of SEQ ID NO:167; or (c) the anti-ErbB3 VHCDR1, VHCDR2, VHCDR3 of the PBA comprise the aa sequence of the corresponding CDRs of SEQ ID NO: 136 and the anti-ErbB3 VLCDR1, VLCDR2 and VLCDR3 of the PBA comprise the aa sequence of the corresponding CDRs of SEQ ID NO: 168; or (d) the anti-ErbB3 VHCDR1, VHCDR2, VHCDR3 of the PBA comprise the aa sequence of the corresponding CDRs of SEQ ID NO:137 and the anti-ErbB3 VLCDR1, VLCDR2 and VLCDR3 of the PBA comprise the aa sequence of the corresponding CDRs of SEQ ID NO: 169; or (e) the anti-ErbB3 VHCDR1, VHCDR2, VHCDR3 of the PBA comprise the aa sequence of the corresponding CDRs of SEQ ID NO:138 and the anti-ErbB3 VLCDR1, VLCDR2 and VLCDR3 of the PBA comprise the aa sequence of the corresponding CDRs of SEQ ID NO: 170; or (f) the anti-ErbB3 VHCDR1, VHCDR2, VHCDR3 of the PBA comprise the aa sequence of the corresponding CDRs of SEQ ID NO:139 and the anti-ErbB3 VLCDR1, VLCDR2 and VLCDR3 of the PBA comprise the aa sequence of the corresponding CDRs of SEQ ID NO:171; or (g) the anti-ErbB3 VHCDR1, VHCDR2, VHCDR3 of the PBA comprise the aa sequence of the corresponding CDRs of SEQ ID NO: 140 and the anti-ErbB3 VLCDR1, VLCDR2 and VLCDR3 of the PBA comprise the aa sequence of the corresponding CDRs of SEQ ID NO: 172; or (h) the anti-ErbB3 VHCDR1, VHCDR2, VHCDR3 of the PBA comprise the aa sequence of the corresponding CDRs of SEQ ID NO: 141 and the anti-ErbB3 VLCDR1, VLCDR2 and VLCDR3 of the PBA comprise the aa sequence of the corresponding CDRs of SEQ ID NOs: 173; or (i) the anti-ErbB3 VHCDR1, VHCDR2, VHCDR3 of the PBA comprise the aa sequence of the corresponding CDRs of SEQ ID NO: 142 and the anti-ErbB3 VLCDR1, VLCDR2 and VLCDR3 of the PBA comprise the aa sequence of the corresponding CDRs of SEQ ID NO: 174; or (j) the anti-ErbB3 VHCDR1, VHCDR2, VHCDR3 of the PBA comprise the aa sequence of the corresponding CDRs of SEQ ID NO:143 and the anti-ErbB3 VLCDR1, VLCDR2 and VLCDR3 of the PBA comprise the aa sequence of the corresponding CDRs of SEQ ID NO:175; or (k) the anti-ErbB3 VHCDR1, VHCDR2, VHCDR3 of the PBA comprise the aa sequence of the corresponding CDRs of SEQ ID NO: 136 and the anti-ErbB3 VLCDR1, VLCDR2 and VLCDR3 of the PBA comprise the aa sequence of the corresponding CDRs of SEQ ID NO:169.

[0125] In certain embodiments, the anti-IGF-1R VHCDR1, VHCDR2, VHCDR3 of a PBA comprise the aa sequence of the corresponding CDRs of SEQ ID NO:9 and the anti-IGF-1R VLCDR1, VLCDR2 and VLCDR3 of the PBA comprise the aa sequence of the corresponding CDRs of SEQ ID NO:33; and (a) the anti-ErbB3 VHCDR1, VHCDR2, VHCDR3 of the PBA comprise the aa sequence of the corresponding CDRs of SEQ ID NO:134 and the anti-ErbB3 VLCDR1, VLCDR2 and VLCDR3 of the PBA comprise the aa sequence of the corresponding CDRs of SEQ ID NO: 166; or (b) the anti-ErbB3 VHCDR1, VHCDR2, VHCDR3 of the PBA comprise the aa sequence of the corresponding CDRs of SEQ ID NO:135 and the anti-ErbB3 VLCDR1, VLCDR2 and VLCDR3 of the PBA comprise the aa sequence of the corresponding CDRs of SEQ ID NO:167; or (c) the anti-ErbB3 VHCDR1, VHCDR2, VHCDR3 of the PBA comprise the aa sequence of the corresponding CDRs of SEQ ID NO: 136 and the anti-ErbB3 VLCDR1, VLCDR2 and VLCDR3 of the PBA comprise the aa sequence of the corresponding CDRs of SEQ ID NO:168; or (d) the anti-ErbB3 VHCDR1, VHCDR2, VHCDR3 of the PBA comprise the aa sequence of the corresponding CDRs of SEQ ID NO:137 and the anti-ErbB3 VLCDR1, VLCDR2 and VLCDR3 of the PBA comprise the aa sequence of the corresponding CDRs of SEQ ID NO: 169; or (e) the anti-ErbB3 VHCDR1, VHCDR2, VHCDR3 of the PBA comprise the aa sequence of the corresponding CDRs of SEQ ID NO:138 and the anti-ErbB3 VLCDR1, VLCDR2 and VLCDR3 of the PBA comprise the aa sequence of the corresponding CDRs of SEQ ID NO: 170; or (f) the anti-ErbB3 VHCDR1, VHCDR2, VHCDR3 of the PBA comprise the aa sequence of the corresponding CDRs of SEQ ID NO:139 and the anti-ErbB3 VLCDR1, VLCDR2 and VLCDR3 of the PBA comprise the aa sequence of the corresponding CDRs of SEQ ID NO:171; or (g) the anti-ErbB3 VHCDR1, VHCDR2, VHCDR3 of the PBA comprise the aa sequence of the corresponding CDRs of SEQ ID NO: 140 and the anti-ErbB3 VLCDR1, VLCDR2 and VLCDR3 of the PBA comprise the aa sequence of the corresponding CDRs of SEQ ID NO: 172; or (h) the anti-ErbB3 VHCDR1, VHCDR2, VHCDR3 of the PBA comprise the aa sequence of the corresponding CDRs of SEQ ID NO: 141 and the anti-ErbB3 VLCDR1, VLCDR2 and VLCDR3 of the PBA comprise the aa sequence of the corresponding CDRs of SEQ ID NOs: 173; or (i) the anti-ErbB3 VHCDR1, VHCDR2, VHCDR3 of the PBA comprise the aa sequence of the corresponding CDRs of SEQ ID NO: 142 and the anti-ErbB3 VLCDR1, VLCDR2 and VLCDR3 of the PBA comprise the aa sequence of the corresponding CDRs of SEQ ID NO: 174; or (j) the anti-ErbB3 VHCDR1, VHCDR2, VHCDR3 of the PBA comprise the aa sequence of the corresponding CDRs of SEQ ID NO:143 and the anti-ErbB3 VLCDR1, VLCDR2 and VLCDR3 of the PBA comprise the aa sequence of the corresponding CDRs of SEQ ID NO:175; or (k) the anti-ErbB3 VHCDR1, VHCDR2, VHCDR3 of the PBA comprise the aa sequence of the corresponding CDRs of SEQ ID NO: 136 and the anti-ErbB3 VLCDR1, VLCDR2 and VLCDR3 of the PBA comprise the aa sequence of the corresponding CDRs of SEQ ID NO:169.

[0126] In certain embodiments, the anti-IGF-1R VHCDR1, VHCDR2, VHCDR3 of a PBA comprise the aa sequence of the corresponding CDRs of SEQ ID NO:10 and the anti-IGF-1R VLCDR1, VLCDR2 and VLCDR3 of the PBA comprise the aa sequence of the corresponding CDRs of SEQ ID NO:34; and (a) the anti-ErbB3 VHCDR1, VHCDR2, VHCDR3 of the PBA comprise the aa sequence of the corresponding CDRs of SEQ ID NO:134 and the anti-ErbB3 VLCDR1, VLCDR2 and VLCDR3 of the PBA comprise the aa sequence of the corresponding CDRs of SEQ ID NO: 166; or (b) the anti-ErbB3 VHCDR1, VHCDR2, VHCDR3 of the PBA comprise the aa sequence of the corresponding CDRs of SEQ ID NO:135 and the anti-ErbB3 VLCDR1, VLCDR2 and VLCDR3 of the PBA comprise the aa sequence of the corresponding CDRs of SEQ ID NO:167; or (c) the anti-ErbB3 VHCDR1, VHCDR2, VHCDR3 of the PBA comprise the aa sequence of the corresponding CDRs of SEQ ID NO: 136 and the anti-ErbB3 VLCDR1, VLCDR2 and VLCDR3 of the PBA comprise the aa sequence of the corresponding CDRs of SEQ ID NO: 168; or (d) the anti-ErbB3 VHCDR1, VHCDR2, VHCDR3 of the PBA comprise the aa sequence of the corresponding CDRs of SEQ ID NO:137 and the anti-ErbB3 VLCDR1, VLCDR2 and VLCDR3 of the PBA comprise the aa sequence of the corresponding CDRs of SEQ ID NO: 169; or (e) the anti-ErbB3 VHCDR1, VHCDR2, VHCDR3 of the PBA comprise the aa sequence of the corresponding CDRs of SEQ ID NO:138 and the anti-ErbB3 VLCDR1, VLCDR2 and VLCDR3 of the PBA comprise the aa sequence of the corresponding CDRs of SEQ ID NO: 170; or (f) the anti-ErbB3 VHCDR1, VHCDR2, VHCDR3 of the PBA comprise the aa sequence of the corresponding CDRs of SEQ ID NO:139 and the anti-ErbB3 VLCDR1, VLCDR2 and VLCDR3 of the PBA comprise the aa sequence of the corresponding CDRs of SEQ ID NO:171; or (g) the anti-ErbB3 VHCDR1, VHCDR2, VHCDR3 of the PBA comprise the aa sequence of the corresponding CDRs of SEQ ID NO: 140 and the anti-ErbB3 VLCDR1, VLCDR2 and VLCDR3 of the PBA comprise the aa sequence of the corresponding CDRs of SEQ ID NO: 172; or (h) the anti-ErbB3 VHCDR1, VHCDR2, VHCDR3 of the PBA comprise the aa sequence of the corresponding CDRs of SEQ ID NO: 141 and the anti-ErbB3 VLCDR1, VLCDR2 and VLCDR3 of the PBA comprise the aa sequence of the corresponding CDRs of SEQ ID NOs: 173; or (i) the anti-ErbB3 VHCDR1, VHCDR2, VHCDR3 of the PBA comprise the aa sequence of the corresponding CDRs of SEQ ID NO: 142 and the anti-ErbB3 VLCDR1, VLCDR2 and VLCDR3 of the PBA comprise the aa sequence of the corresponding CDRs of SEQ ID NO: 174; or (j) the anti-ErbB3 VHCDR1, VHCDR2, VHCDR3 of the PBA comprise the aa sequence of the corresponding CDRs of SEQ ID NO:143 and the anti-ErbB3 VLCDR1, VLCDR2 and VLCDR3 of the PBA comprise the aa sequence of the corresponding CDRs of SEQ ID NO:175; or (k) the anti-ErbB3 VHCDR1, VHCDR2, VHCDR3 of the PBA comprise the aa sequence of the corresponding CDRs of SEQ ID NO: 136 and the anti-ErbB3 VLCDR1, VLCDR2 and VLCDR3 of the PBA comprise the aa sequence of the corresponding CDRs of SEQ ID NO:169.

[0127] In certain embodiments, the anti-IGF-1R VHCDR1, VHCDR2, VHCDR3 of a PBA comprise the aa sequence of the corresponding CDRs of SEQ ID NO:11 and the anti-IGF-1R VLCDR1, VLCDR2 and VLCDR3 of the PBA comprise the aa sequence of the corresponding CDRs of SEQ ID NO:35; and (a) the anti-ErbB3 VHCDR1, VHCDR2, VHCDR3 of the PBA comprise the aa sequence of the corresponding CDRs of SEQ ID NO:134 and the anti-ErbB3 VLCDR1, VLCDR2 and VLCDR3 of the PBA comprise the aa sequence of the corresponding CDRs of SEQ ID NO: 166; or (b) the anti-ErbB3 VHCDR1, VHCDR2, VHCDR3 of the PBA comprise the aa sequence of the corresponding CDRs of SEQ ID NO:135 and the anti-ErbB3 VLCDR1, VLCDR2 and VLCDR3 of the PBA comprise the aa sequence of the corresponding CDRs of SEQ ID NO:167; or (c) the anti-ErbB3 VHCDR1, VHCDR2, VHCDR3 of the PBA comprise the aa sequence of the corresponding CDRs of SEQ ID NO: 136 and the anti-ErbB3 VLCDR1, VLCDR2 and VLCDR3 of the PBA comprise the aa sequence of the corresponding CDRs of SEQ ID NO: 168; or (d) the anti-ErbB3 VHCDR1, VHCDR2, VHCDR3 of the PBA comprise the aa sequence of the corresponding CDRs of SEQ ID NO:137 and the anti-ErbB3 VLCDR1, VLCDR2 and VLCDR3 of the PBA comprise the aa sequence of the corresponding CDRs of SEQ ID NO: 169; or (e) the anti-ErbB3 VHCDR1, VHCDR2, VHCDR3 of the PBA comprise the aa sequence of the corresponding CDRs of SEQ ID NO:138 and the anti-ErbB3 VLCDR1, VLCDR2 and VLCDR3 of the PBA comprise the aa sequence of the corresponding CDRs of SEQ ID NO: 170; or (f) the anti-ErbB3 VHCDR1, VHCDR2, VHCDR3 of the PBA comprise the aa sequence of the corresponding CDRs of SEQ ID NO:139 and the anti-ErbB3 VLCDR1, VLCDR2 and VLCDR3 of the PBA comprise the aa sequence of the corresponding CDRs of SEQ ID NO:171; or (g) the anti-ErbB3 VHCDR1, VHCDR2, VHCDR3 of the PBA comprise the aa sequence of the corresponding CDRs of SEQ ID NO: 140 and the anti-ErbB3 VLCDR1, VLCDR2 and VLCDR3 of the PBA comprise the aa sequence of the corresponding CDRs of SEQ ID NO: 172; or (h) the anti-ErbB3 VHCDR1, VHCDR2, VHCDR3 of the PBA comprise the aa sequence of the corresponding CDRs of SEQ ID NO: 141 and the anti-ErbB3 VLCDR1, VLCDR2 and VLCDR3 of the PBA comprise the aa sequence of the corresponding CDRs of SEQ ID NOs: 173; or (i) the anti-ErbB3 VHCDR1, VHCDR2, VHCDR3 of the PBA comprise the aa sequence of the corresponding CDRs of SEQ ID NO: 142 and the anti-ErbB3 VLCDR1, VLCDR2 and VLCDR3 of the PBA comprise the aa sequence of the corresponding CDRs of SEQ ID NO: 174; or (j) the anti-ErbB3 VHCDR1, VHCDR2, VHCDR3 of the PBA comprise the aa sequence of the corresponding CDRs of SEQ ID NO:136 and the anti-ErbB3 VLCDR1, VLCDR2 and VLCDR3 of the PBA comprise the aa sequence of the corresponding CDRs of SEQ ID NO: 169.

[0128] In certain embodiments, the anti-IGF-1R VHCDR1, VHCDR2, VHCDR3 of a PBA comprise the aa sequence of the corresponding CDRs of SEQ ID NO:8 and the anti-IGF-1R VLCDR1, VLCDR2 and VLCDR3 of the PBA comprise the aa sequence of the corresponding CDRs of SEQ ID NO:33; and (a) the anti-ErbB3 VHCDR1, VHCDR2, VHCDR3 of the PBA comprise the aa sequence of the corresponding CDRs of SEQ ID NO:134 and the anti-ErbB3 VLCDR1, VLCDR2 and VLCDR3 of the PBA comprise the aa sequence of the corresponding CDRs of SEQ ID NO: 166; or (b) the anti-ErbB3 VHCDR1, VHCDR2, VHCDR3 of the PBA comprise the aa sequence of the corresponding CDRs of SEQ ID NO:135 and the anti-ErbB3 VLCDR1, VLCDR2 and VLCDR3 of the PBA comprise the aa sequence of the corresponding CDRs of SEQ ID NO:167; or (c) the anti-ErbB3 VHCDR1, VHCDR2, VHCDR3 of the PBA comprise the aa sequence of the corresponding CDRs of SEQ ID NO: 136 and the anti-ErbB3 VLCDR1, VLCDR2 and VLCDR3 of the PBA comprise the aa sequence of the corresponding CDRs of SEQ ID NO:168; or (d) the anti-ErbB3 VHCDR1, VHCDR2, VHCDR3 of the PBA comprise the aa sequence of the corresponding CDRs of SEQ ID NO:137 and the anti-ErbB3 VLCDR1, VLCDR2 and VLCDR3 of the PBA comprise the aa sequence of the corresponding CDRs of SEQ ID NO: 169; or (e) the anti-ErbB3 VHCDR1, VHCDR2, VHCDR3 of the PBA comprise the aa sequence of the corresponding CDRs of SEQ ID NO:138 and the anti-ErbB3 VLCDR1, VLCDR2 and VLCDR3 of the PBA comprise the aa sequence of the corresponding CDRs of SEQ ID NO: 170; or (f) the anti-ErbB3 VHCDR1, VHCDR2, VHCDR3 of the PBA comprise the aa sequence of the corresponding CDRs of SEQ ID NO:139 and the anti-ErbB3 VLCDR1, VLCDR2 and VLCDR3 of the PBA comprise the aa sequence of the corresponding CDRs of SEQ ID NO:171; or (g) the anti-ErbB3 VHCDR1, VHCDR2, VHCDR3 of the PBA comprise the aa sequence of the corresponding CDRs of SEQ ID NO: 140 and the anti-ErbB3 VLCDR1, VLCDR2 and VLCDR3 of the PBA comprise the aa sequence of the corresponding CDRs of SEQ ID NO: 172; or (h) the anti-ErbB3 VHCDR1, VHCDR2, VHCDR3 of the PBA comprise the aa sequence of the corresponding CDRs of SEQ ID NO: 141 and the anti-ErbB3 VLCDR1, VLCDR2 and VLCDR3 of the PBA comprise the aa sequence of the corresponding CDRs of SEQ ID NOs: 173; or (i) the anti-ErbB3 VHCDR1, VHCDR2, VHCDR3 of the PBA comprise the aa sequence of the corresponding CDRs of SEQ ID NO: 142 and the anti-ErbB3 VLCDR1, VLCDR2 and VLCDR3 of the PBA comprise the aa sequence of the corresponding CDRs of SEQ ID NO: 174; or (j) the anti-ErbB3 VHCDR1, VHCDR2, VHCDR3 of the PBA comprise the aa sequence of the corresponding CDRs of SEQ ID NO:143 and the anti-ErbB3 VLCDR1, VLCDR2 and VLCDR3 of the PBA comprise the aa sequence of the corresponding CDRs of SEQ ID NO:175; or (k) the anti-ErbB3 VHCDR1, VHCDR2, VHCDR3 of the PBA comprise the aa sequence of the corresponding CDRs of SEQ ID NO: 136 and the anti-ErbB3 VLCDR1, VLCDR2 and VLCDR3 of the PBA comprise the aa sequence of the corresponding CDRs of SEQ ID NO:169.

[0129] In certain embodiments, the anti-IGF-1R VHCDR1, VHCDR2, VHCDR3 of a PBA comprise the aa sequence of the corresponding CDRs of SEQ ID NO:10 and the anti-IGF-1R VLCDR1, VLCDR2 and VLCDR3 of the PBA comprise the aa sequence of the corresponding CDRs of SEQ ID NO:32; and (a) the anti-ErbB3 VHCDR1, VHCDR2, VHCDR3 of the PBA comprise the aa sequence of the corresponding CDRs of SEQ ID NO:134 and the anti-ErbB3 VLCDR1, VLCDR2 and VLCDR3 of the PBA comprise the aa sequence of the corresponding CDRs of SEQ ID NO: 166; or (b) the anti-ErbB3 VHCDR1, VHCDR2, VHCDR3 of the PBA comprise the aa sequence of the corresponding CDRs of SEQ ID NO:135 and the anti-ErbB3 VLCDR1, VLCDR2 and VLCDR3 of the PBA comprise the aa sequence of the corresponding CDRs of SEQ ID NO:167; or (c) the anti-ErbB3 VHCDR1, VHCDR2, VHCDR3 of the PBA comprise the aa sequence of the corresponding CDRs of SEQ ID NO: 136 and the anti-ErbB3 VLCDR1, VLCDR2 and VLCDR3 of the PBA comprise the aa sequence of the corresponding CDRs of SEQ ID NO: 168; or (d) the anti-ErbB3 VHCDR1, VHCDR2, VHCDR3 of the PBA comprise the aa sequence of the corresponding CDRs of SEQ ID NO:137 and the anti-ErbB3 VLCDR1, VLCDR2 and VLCDR3 of the PBA comprise the aa sequence of the corresponding CDRs of SEQ ID NO: 169; or (e) the anti-ErbB3 VHCDR1, VHCDR2, VHCDR3 of the PBA comprise the aa sequence of the corresponding CDRs of SEQ ID NO:138 and the anti-ErbB3 VLCDR1, VLCDR2 and VLCDR3 of the PBA comprise the aa sequence of the corresponding CDRs of SEQ ID NO: 170; or (f) the anti-ErbB3 VHCDR1, VHCDR2, VHCDR3 of the PBA comprise the aa sequence of the corresponding CDRs of SEQ ID NO:139 and the anti-ErbB3 VLCDR1, VLCDR2 and VLCDR3 of the PBA comprise the aa sequence of the corresponding CDRs of SEQ ID NO:171; or (g) the anti-ErbB3 VHCDR1, VHCDR2, VHCDR3 of the PBA comprise the aa sequence of the corresponding CDRs of SEQ ID NO: 140 and the anti-ErbB3 VLCDR1, VLCDR2 and VLCDR3 of the PBA comprise the aa sequence of the corresponding CDRs of SEQ ID NO: 172; or (h) the anti-ErbB3 VHCDR1, VHCDR2, VHCDR3 of the PBA comprise the aa sequence of the corresponding CDRs of SEQ ID NO: 141 and the anti-ErbB3 VLCDR1, VLCDR2 and VLCDR3 of the PBA comprise the aa sequence of the corresponding CDRs of SEQ ID NOs: 173; or (i) the anti-ErbB3 VHCDR1, VHCDR2, VHCDR3 of the PBA comprise the aa sequence of the corresponding CDRs of SEQ ID NO: 142 and the anti-ErbB3 VLCDR1, VLCDR2 and VLCDR3 of the PBA comprise the aa sequence of the corresponding CDRs of SEQ ID NO: 174; or (j) the anti-ErbB3 VHCDR1, VHCDR2, VHCDR3 of the PBA comprise the aa sequence of the corresponding CDRs of SEQ ID NO:143 and the anti-ErbB3 VLCDR1, VLCDR2 and VLCDR3 of the PBA comprise the aa sequence of the corresponding CDRs of SEQ ID NO:175; or (k) the anti-ErbB3 VHCDR1, VHCDR2, VHCDR3 of the PBA comprise the aa sequence of the corresponding CDRs of SEQ ID NO: 136 and the anti-ErbB3 VLCDR1, VLCDR2 and VLCDR3 of the PBA comprise the aa sequence of the corresponding CDRs of SEQ ID NO:169.

[0130] In certain embodiments, each anti-IGF-1R binding site of a PBA comprises a VH domain comprising the sequence of SEQ ID NO: 1, wherein the sequence comprises variable aas, and/or each anti-IGF-1R binding site of a PBA comprises a VL domain comprising the sequence of SEQ ID NO:2 (or 3), wherein the sequence comprises variable aas.

[0131] In certain embodiments, each anti-ErbB3 binding site of a PBA comprises a VH domain comprising the sequence of SEQ ID NO:4 (or 5), wherein the sequence comprises variable aas, and/or each anti-ErbB3 binding site of a PBA comprises a VL domain comprising the sequence of SEQ ID NO:6 (or 7), wherein the sequence comprises variable aas.

[0132] In certain embodiments, each anti-IGF-1R binding site of a PBA comprises a VH domain comprising the sequence of SEQ ID NO:1 and a VL domain comprising the sequence of SEQ ID NO:2 (or 3) and each anti-ErbB3 binding site of the PBA comprises a VH domain comprising the sequence of SEQ ID NO:4 (or 5) and a VL domain comprising the sequence of SEQ ID NO:6 (or 7).

[0133] In certain embodiments, each anti-IGF-1R binding site of a PBA comprises a VH domain comprising the aa sequence of SEQ ID NO:1, wherein X1 is not T, X2 is not V, X6 is not R, X8 is not D or X10 is not I, or a VL domain comprising the aa sequence of SEQ ID NO:3 or each anti-ErbB3 binding site of a PBA comprises a VH domain comprising the aa sequence of SEQ ID NO:5 or a VL domain comprising the sequence of SEQ ID NO:7. In certain embodiments, each anti-IGF-1R binding site of a PBA comprises a VH domain comprising the aa sequence of SEQ ID NO:1, wherein X1 is not T, X2 is not V, X6 is not R, X8 is not D or X10 is not I, a VL domain comprising the sequence of SEQ ID NO:3; and each anti-ErbB3 binding site of the PBA comprises a VH domain comprising the aa sequence of SEQ ID NO:5 and a VL domain comprising the sequence of SEQ ID NO:7.

[0134] In certain embodiments, each anti-IGF-1R binding site of a PBA comprises a VH domain comprising an aa sequence selected from the group consisting of SEQ ID NOs: 8-31 and/or a VL domain comprising an aa sequence selected from the group consisting of SEQ ID NOs: 32-133 and/or each anti-ErbB3 binding site comprises a VH aa sequence selected from the group consisting of SEQ ID NOs: 134-165; and/or a VL aa sequence selected from the group consisting of SEQ ID NOs: 166-200. In certain embodiments, (a) each first VH domain comprises an aa sequence selected from the group consisting of SEQ ID NOs: 8-31, each first VL domain comprises an aa sequence selected from the group consisting of SEQ ID NOs: 32-133, each second VH domain comprises an aa sequence selected from the group consisting of SEQ ID NOs: 134-165 and each second VL domain comprises an aa sequence selected from the group consisting of SEQ ID NOs: 166-200, or (b) each first VH domain comprises an aa sequence selected from the group consisting of SEQ ID NOs: 134-165, each first VL domain comprises an aa sequence selected from the group consisting of SEQ ID NOs: 166-200, each second VH domain comprises an aa sequence selected from the group consisting of SEQ ID NOs: 8-31 and each second VL domain consisting of an aa sequence selected from the group consisting of SEQ ID NOs: 32-133.

[0135] In certain embodiments, each anti-IGF-1R VH domain of a PBA comprises the aa sequence of SEQ ID NO:8 and each anti-IGF-1R VL domain of the PBA comprises the aa sequence of SEQ ID NO:32. In certain embodiments, each anti-IGF-1R VH domain of a PBA comprises the aa sequence of SEQ ID NO:9 and each anti-IGF-1R VL domain of the PBA comprises the aa sequence of SEQ ID NO:33. In certain embodiments, each anti-IGF-1R VH domain of a PBA comprises the aa sequence of SEQ ID NO:10 and each anti-IGF-1R VL domain of the PBA comprises the aa sequence of SEQ ID NO:34. In certain embodiments, each anti-IGF-1R VH domain of a PBA comprises the aa sequence of SEQ ID NO:11 and each anti-IGF-1R VL domain of the PBA comprises the aa sequence of SEQ ID NO:35. In certain embodiments, each anti-IGF-1R VH domain of a PBA comprises the aa sequence of SEQ ID NO:8 and each anti-IGF-1R VL domain of the PBA comprises the aa sequence of SEQ ID NO:33. In certain embodiments, each anti-IGF-1R VH domain of a PBA comprises the aa sequence of SEQ ID NO:10 and each anti-IGF-1R VL domain of the PBA comprises the aa sequence of SEQ ID NO:32.

[0136] In certain embodiments, each anti-ErbB3 VH domain of a PBA comprises the aa sequence of SEQ ID NO:134 and each anti-ErbB3 VL domain of the PBA comprises the aa sequence of SEQ ID NO:166. In certain embodiments, each anti-ErbB3 VH domain of a PBA comprises the aa sequence of SEQ ID NO: 135 and the anti-ErbB3 VL domain of the PBA comprise the aa sequence of SEQ ID NO:167. In certain embodiments, each anti-ErbB3 VH domain of a PBA comprises the aa sequence of SEQ ID NO:136 and each anti-ErbB3 VL domain of the PBA comprises the aa sequence of SEQ ID NO:168. In certain embodiments, each anti-ErbB3 VH domain of a PBA comprises the aa sequence of SEQ ID NO:137 and each anti-ErbB3 VL domain of the PBA comprises the aa sequence of SEQ ID NO:169. In certain embodiments, each anti-ErbB3 VH domain of a PBA comprises the aa sequence of SEQ ID NO:138 and each anti-ErbB3 VL domain of the PBA comprises the aa sequence of SEQ ID NO: 170. In certain embodiments, each anti-ErbB3 VH domain of a PBA comprises the aa sequence of SEQ ID NO:139 and each anti-ErbB3 VL domain of the PBA comprises the aa sequence of SEQ ID NO:171. In certain embodiments, each anti-ErbB3 VH domain of a PBA comprises the aa sequence of SEQ ID NO: 140 and each anti-ErbB3 VL domain of the PBA comprises the aa sequence of SEQ ID NO: 172. In certain embodiments, each anti-ErbB3 VH domain of a PBA comprises the aa sequence of SEQ ID NO: 141 and each anti-ErbB3 VL domain of the PBA comprises the aa sequence of SEQ ID NO: 173. In certain embodiments, each anti-ErbB3 VH domain of a PBA comprises the aa sequence of SEQ ID NO: 142 and each anti-ErbB3 VL domain of the PBA comprises the aa sequence of SEQ ID NO: 174. In certain embodiments, each anti-ErbB3 VH domain of a PBA comprises the aa sequence of SEQ ID NO: 143 and each anti-ErbB3 VL domain of the PBA comprises the aa sequence of SEQ ID NO: 175. In certain embodiments, each anti-ErbB3 VH domain of a PBA comprises the aa sequence of SEQ ID NO:136 and each anti-ErbB3 VL domain of the PBA comprises the aa sequence of SEQ ID NOs: 169.

[0137] In certain embodiments, each anti-IGF-1R VH domain of a PBA comprises the aa sequence of SEQ ID NO:8 and each anti-IGF-1R VL domain of the PBA comprises the aa sequence of SEQ ID NO:32; and (a) each anti-ErbB3 VH domain of the PBA comprises the aa sequence of SEQ ID NO: 134 and each anti-ErbB3 VL domain of the PBA comprises the aa sequence of SEQ ID NO: 166; or (b) each anti-ErbB3 VH domain of the PBA comprises the aa sequence of SEQ ID NO:135 and the anti-ErbB3 VL domain of the PBA comprise the aa sequence of SEQ ID NO: 167; or (c) each anti-ErbB3 VH domain of the PBA comprises the aa sequence of SEQ ID NO: 136 and each anti-ErbB3 VL domain of the PBA comprises the aa sequence of SEQ ID NO: 168; or (d) each anti-ErbB3 VH domain of the PBA comprises the aa sequence of SEQ ID NO: 137 and each anti-ErbB3 VL domain of the PBA comprises the aa sequence of SEQ ID NO: 169; or (e) each anti-ErbB3 VH domain of the PBA comprises the aa sequence of SEQ ID NO: 138 and each anti-ErbB3 VL domain of the PBA comprises the aa sequence of SEQ ID NO: 170; or (f) each anti-ErbB3 VH domain of the PBA comprises the aa sequence of SEQ ID NO: 139 and each anti-ErbB3 VL domain of the PBA comprises the aa sequence of SEQ ID NO:171; or (g) each anti-ErbB3 VH domain of the PBA comprises the aa sequence of SEQ ID NO: 140 and each anti-ErbB3 VL domain of the PBA comprises the aa sequence of SEQ ID NO: 172; or (h) each anti-ErbB3 VH domain of the PBA comprises the aa sequence of SEQ ID NO: 141 and each anti-ErbB3 VL domain of the PBA comprises the aa sequence of SEQ ID NO: 173; or (i) each anti-ErbB3 VH domain of the PBA comprises the aa sequence of SEQ ID NO: 142 and each anti-ErbB3 VL domain of the PBA comprises the aa sequence of SEQ ID NO: 174; or (j) each anti-ErbB3 VH domain of the PBA comprises the aa sequence of SEQ ID NO: 143 and each anti-ErbB3 VL domain of the PBA comprises the aa sequence of SEQ ID NO: 175; or (k) each anti-ErbB3 VH domain of the PBA comprises the aa sequence of SEQ ID NO: 136 and each anti-ErbB3 VL domain of the PBA comprises the aa sequence of SEQ ID NOs: 169.

[0138] In certain embodiments, each anti-IGF-1R VH domain of a PBA comprises the aa sequence of SEQ ID NO:9 and each anti-IGF-1R VL domain of the PBA comprises the aa sequence of SEQ ID NO:33; and (a) each anti-ErbB3 VH domain of the PBA comprises the aa sequence of SEQ ID NO: 134 and each anti-ErbB3 VL domain of the PBA comprises the aa sequence of SEQ ID NO: 166; or (b) each anti-ErbB3 VH domain of the PBA comprises the aa sequence of SEQ ID NO:135 and the anti-ErbB3 VL domain of the PBA comprise the aa sequence of SEQ ID NO: 167; or (c) each anti-ErbB3 VH domain of the PBA comprises the aa sequence of SEQ ID NO: 136 and each anti-ErbB3 VL domain of the PBA comprises the aa sequence of SEQ ID NO: 168; or (d) each anti-ErbB3 VH domain of the PBA comprises the aa sequence of SEQ ID NO: 137 and each anti-ErbB3 VL domain of the PBA comprises the aa sequence of SEQ ID NO: 169; or (e) each anti-ErbB3 VH domain of the PBA comprises the aa sequence of SEQ ID NO: 138 and each anti-ErbB3 VL domain of the PBA comprises the aa sequence of SEQ ID NO: 170; or (f) each anti-ErbB3 VH domain of the PBA comprises the aa sequence of SEQ ID NO: 139 and each anti-ErbB3 VL domain of the PBA comprises the aa sequence of SEQ ID NO:171; or (g) each anti-ErbB3 VH domain of the PBA comprises the aa sequence of SEQ ID NO: 140 and each anti-ErbB3 VL domain of the PBA comprises the aa sequence of SEQ ID NO: 172; or (h) each anti-ErbB3 VH domain of the PBA comprises the aa sequence of SEQ ID NO: 141 and each anti-ErbB3 VL domain of the PBA comprises the aa sequence of SEQ ID NO: 173; or (i) each anti-ErbB3 VH domain of the PBA comprises the aa sequence of SEQ ID NO: 142 and each anti-ErbB3 VL domain of the PBA comprises the aa sequence of SEQ ID NO: 174; or (j) each anti-ErbB3 VH domain of the PBA comprises the aa sequence of SEQ ID NO: 143 and each anti-ErbB3 VL domain of the PBA comprises the aa sequence of SEQ ID NO: 175; or (k) each anti-ErbB3 VH domain of the PBA comprises the aa sequence of SEQ ID NO: 136 and each anti-ErbB3 VL domain of the PBA comprises the aa sequence of SEQ ID NOs: 169.

[0139] In certain embodiments, each anti-IGF-1R VH domain comprises the aa sequence of SEQ ID NO:10 and each anti-IGF-1R VL domain comprises the aa sequence of SEQ ID NO:34; and (a) each anti-ErbB3 VH domain of the PBA comprises the aa sequence of SEQ ID NO:134 and each anti-ErbB3 VL domain of the PBA comprises the aa sequence of SEQ ID NO: 166; or (b) each anti-ErbB3 VH domain of the PBA comprises the aa sequence of SEQ ID NO: 135 and the anti-ErbB3 VL domain of the PBA comprise the aa sequence of SEQ ID NO: 167; or (c) each anti-ErbB3 VH domain of the PBA comprises the aa sequence of SEQ ID NO: 136 and each anti-ErbB3 VL domain of the PBA comprises the aa sequence of SEQ ID NO: 168; or (d) each anti-ErbB3 VH domain of the PBA comprises the aa sequence of SEQ ID NO: 137 and each anti-ErbB3 VL domain of the PBA comprises the aa sequence of SEQ ID NO: 169; or (e) each anti-ErbB3 VH domain of the PBA comprises the aa sequence of SEQ ID NO:138 and each anti-ErbB3 VL domain of the PBA comprises the aa sequence of SEQ ID NO: 170; or (f) each anti-ErbB3 VH domain of the PBA comprises the aa sequence of SEQ ID NO:139 and each anti-ErbB3 VL domain of the PBA comprises the aa sequence of SEQ ID NO:171; or (g) each anti-ErbB3 VH domain of the PBA comprises the aa sequence of SEQ ID NO: 140 and each anti-ErbB3 VL domain of the PBA comprises the aa sequence of SEQ ID NO: 172; or (h) each anti-ErbB3 VH domain of the PBA comprises the aa sequence of SEQ ID NO: 141 and each anti-ErbB3 VL domain of the PBA comprises the aa sequence of SEQ ID NO: 173; or (i) each anti-ErbB3 VH domain of the PBA comprises the aa sequence of SEQ ID NO: 142 and each anti-ErbB3 VL domain of the PBA comprises the aa sequence of SEQ ID NO: 174; or (j) each anti-ErbB3 VH domain of the PBA comprises the aa sequence of SEQ ID NO: 143 and each anti-ErbB3 VL domain of the PBA comprises the aa sequence of SEQ ID NO: 175; or (k) each anti-ErbB3 VH domain of the PBA comprises the aa sequence of SEQ ID NO: 136 and each anti-ErbB3 VL domain of the PBA comprises the aa sequence of SEQ ID NOs: 169.

[0140] In certain embodiments, each anti-IGF-1R VH domain of a PBA comprises the aa sequence of SEQ ID NO:11 and each anti-IGF-1R VL domain of the PBA comprises the aa sequence of SEQ ID NO:35; and (a) each anti-ErbB3 VH domain of the PBA comprises the aa sequence of SEQ ID NO: 134 and each anti-ErbB3 VL domain of the PBA comprises the aa sequence of SEQ ID NO: 166; or (b) each anti-ErbB3 VH domain of the PBA comprises the aa sequence of SEQ ID NO:135 and the anti-ErbB3 VL domain of the PBA comprise the aa sequence of SEQ ID NO: 167; or (c) each anti-ErbB3 VH domain of the PBA comprises the aa sequence of SEQ ID NO: 136 and each anti-ErbB3 VL domain of the PBA comprises the aa sequence of SEQ ID NO: 168; or (d) each anti-ErbB3 VH domain of the PBA comprises the aa sequence of SEQ ID NO: 137 and each anti-ErbB3 VL domain of the PBA comprises the aa sequence of SEQ ID NO: 169; or (e) each anti-ErbB3 VH domain of the PBA comprises the aa sequence of SEQ ID NO: 138 and each anti-ErbB3 VL domain of the PBA comprises the aa sequence of SEQ ID NO: 170; or (f) each anti-ErbB3 VH domain of the PBA comprises the aa sequence of SEQ ID NO: 139 and each anti-ErbB3 VL domain of the PBA comprises the aa sequence of SEQ ID NO:171; or (g) each anti-ErbB3 VH domain of the PBA comprises the aa sequence of SEQ ID NO: 140 and each anti-ErbB3 VL domain of the PBA comprises the aa sequence of SEQ ID NO: 172; or (h) each anti-ErbB3 VH domain of the PBA comprises the aa sequence of SEQ ID NO: 141 and each anti-ErbB3 VL domain of the PBA comprises the aa sequence of SEQ ID NO: 173; or (i) each anti-ErbB3 VH domain of the PBA comprises the aa sequence of SEQ ID NO: 142 and each anti-ErbB3 VL domain of the PBA comprises the aa sequence of SEQ ID NO: 174; or (j) each anti-ErbB3 VH domain of the PBA comprises the aa sequence of SEQ ID NO: 136 and each anti-ErbB3 VL domain of the PBA comprises the aa sequence of SEQ ID NOs: 169.

[0141] In certain embodiments, each anti-IGF-1R VH domain of the PBA comprises the aa sequence of SEQ ID NO:8 and each anti-IGF-1R VL domain of the PBA comprises the aa sequence of SEQ ID NO:33; and (a) each anti-ErbB3 VH domain of the PBA comprises the aa sequence of SEQ ID NO: 134 and each anti-ErbB3 VL domain of the PBA comprises the aa sequence of SEQ ID NO: 166; or (b) each anti-ErbB3 VH domain of the PBA comprises the aa sequence of SEQ ID NO:135 and the anti-ErbB3 VL domain of the PBA comprise the aa sequence of SEQ ID NO: 167; or (c) each anti-ErbB3 VH domain of the PBA comprises the aa sequence of SEQ ID NO: 136 and each anti-ErbB3 VL domain of the PBA comprises the aa sequence of SEQ ID NO: 168; or (d) each anti-ErbB3 VH domain of the PBA comprises the aa sequence of SEQ ID NO: 137 and each anti-ErbB3 VL domain of the PBA comprises the aa sequence of SEQ ID NO: 169; or (e) each anti-ErbB3 VH domain of the PBA comprises the aa sequence of SEQ ID NO: 138 and each anti-ErbB3 VL domain of the PBA comprises the aa sequence of SEQ ID NO: 170; or (f) each anti-ErbB3 VH domain of the PBA comprises the aa sequence of SEQ ID NO: 139 and each anti-ErbB3 VL domain of the PBA comprises the aa sequence of SEQ ID NO:171; or (g) each anti-ErbB3 VH domain of the PBA comprises the aa sequence of SEQ ID NO: 140 and each anti-ErbB3 VL domain of the PBA comprises the aa sequence of SEQ ID NO: 172; or (h) each anti-ErbB3 VH domain of the PBA comprises the aa sequence of SEQ ID NO: 141 and each anti-ErbB3 VL domain of the PBA comprises the aa sequence of SEQ ID NO: 173; or (i) each anti-ErbB3 VH domain of the PBA comprises the aa sequence of SEQ ID NO: 142 and each anti-ErbB3 VL domain of the PBA comprises the aa sequence of SEQ ID NO: 174; or (j) each anti-ErbB3 VH domain of the PBA comprises the aa sequence of SEQ ID NO: 143 and each anti-ErbB3 VL domain of the PBA comprises the aa sequence of SEQ ID NO: 175; or (k) each anti-ErbB3 VH domain of the PBA comprises the aa sequence of SEQ ID NO: 136 and each anti-ErbB3 VL domain of the PBA comprises the aa sequence of SEQ ID NOs: 169.

[0142] In certain embodiments, each anti-IGF-1R VH domain of a PBA comprises the aa sequence of SEQ ID NO:10 and each anti-IGF-1R VL domain of the PBA comprises the aa sequence of SEQ ID NO:32; and (a) each anti-ErbB3 VH domain of the PBA comprises the aa sequence of SEQ ID NO: 134 and each anti-ErbB3 VL domain of the PBA comprises the aa sequence of SEQ ID NO: 166; or (b) each anti-ErbB3 VH domain of the PBA comprises the aa sequence of SEQ ID NO:135 and the anti-ErbB3 VL domain of the PBA comprise the aa sequence of SEQ ID NO: 167; or (c) each anti-ErbB3 VH domain of the PBA comprises the aa sequence of SEQ ID NO: 136 and each anti-ErbB3 VL domain of the PBA comprises the aa sequence of SEQ ID NO: 168; or (d) each anti-ErbB3 VH domain of the PBA comprises the aa sequence of SEQ ID NO: 137 and each anti-ErbB3 VL domain of the PBA comprises the aa sequence of SEQ ID NO: 169; or (e) each anti-ErbB3 VH domain of the PBA comprises the aa sequence of SEQ ID NO: 138 and each anti-ErbB3 VL domain of the PBA comprises the aa sequence of SEQ ID NO: 170; or (f) each anti-ErbB3 VH domain of the PBA comprises the aa sequence of SEQ ID NO: 139 and each anti-ErbB3 VL domain of the PBA comprises the aa sequence of SEQ ID NO:171; or (g) each anti-ErbB3 VH domain of the PBA comprises the aa sequence of SEQ ID NO: 140 and each anti-ErbB3 VL domain of the PBA comprises the aa sequence of SEQ ID NO: 172; or (h) each anti-ErbB3 VH domain of the PBA comprises the aa sequence of SEQ ID NO: 141 and each anti-ErbB3 VL domain of the PBA comprises the aa sequence of SEQ ID NO: 173; or (i) each anti-ErbB3 VH domain of the PBA comprises the aa sequence of SEQ ID NO: 142 and each anti-ErbB3 VL domain of the PBA comprises the aa sequence of SEQ ID NO: 174; or (j) each anti-ErbB3 VH domain of the PBA comprises the aa sequence of SEQ ID NO: 143 and each anti-ErbB3 VL domain of the PBA comprises the aa sequence of SEQ ID NO: 175; or (k) each anti-ErbB3 VH domain of the PBA comprises the aa sequence of SEQ ID NO: 136 and each anti-ErbB3 VL domain of the PBA comprises the aa sequence of SEQ ID NOs: 169.

[0143] In certain embodiments, (a) each heavy chain of a PBA comprises an aa sequence selected from the group consisting of SF-G1-P1 (SEQ ID NO:212); SF-G1-M1.3 (SEQ ID NO:214); SF-G1-M27 (SEQ ID NO:216); SF-G1-P6 (SEQ ID NO:218); SF-G1-B69 (SEQ ID NO:220); P4-G1-C8 (SEQ ID NO:222); P4-G1-P1 (SEQ ID NO:224); P4-G1-M1.3 (SEQ ID NO:226); P4-G1-M27 (SEQ ID NO:228); P4-G1-P6 (SEQ ID NO:230); P4-G1-B69 (SEQ ID NO:232); M78-G1-C8 (SEQ ID NO:234); M78-G1-P1 (SEQ ID NO:236); M78-G1-M1.3 (SEQ ID NO:238); M78-G1-M27 (SEQ ID NO:240); M78-G1-P6 (SEQ ID NO:242); M78-G1-B69 (SEQ ID NO:244); M57-G1-C8 (SEQ ID NO:246); M57-G1-P1 (SEQ ID NO:248); M57-G1-M1.3 (SEQ ID NO:250); M57-G1-M27 (SEQ ID NO:252); M57-G1-P6 (SEQ ID NO:254) and M57-G1-B69 (SEQ ID NO:256) and/or each light chain of the PBA comprises an aa sequence selected from the group consisting of SF kappa light chain (SEQ ID NO:202); P4 kappa light chain (SEQ ID NO:204); M78 kappa light chain (SEQ ID NO:206); and M57 kappa light chain (SEQ ID NO:208); or (b) each heavy chain of a PBA comprises an aa sequence selected from the group consisting of P1-G1-P4 (SEQ ID NO:268); P1-G1-M57 (SEQ ID NO:270); P1-G1-M78 (SEQ ID NO:272); M27-G1-P4 (SEQ ID NO:274); M27-G1-M57 (SEQ ID NO:276); M27-G1-M78 (SEQ ID NO:278); M7-G1-P4 (SEQ ID NO:280); M7-G1-M57 ((SEQ ID NO:282); M7-G1-M78 (SEQ ID NO:284); B72-G1-P4 (SEQ ID NO:286); B72-G1-M57 (SEQ ID NO:288); B72-G1-M78 (SEQ ID NO:290); B60-G1-P4 (SEQ ID NO:292); B60-G1-M57 (SEQ ID NO:294); B60-G1-M78 (SEQ ID NO:296); B60-G2-M78 (SEQ ID NO:355) and M7-G2-M78 (SEQ ID NO:357) and/or each light chain of the PBA comprises an aa sequence selected from the group consisting of P1 lambda light chain (SEQ ID NO:258); M27 lambda light chain (SEQ ID NO:260); M7 lambda light chain (SEQ ID NO:262); B72 lambda light chain (SEQ ID NO:264); and B60 lambda light chain (SEQ ID NO:266).

[0144] In certain embodiments, (a) each heavy chain of a PBA comprises an aa sequence differing in at least one aa addition, deletion or substitution from an aa sequence selected from the group consisting of SF-G1-P1 (SEQ ID NO:212); SF-G1-M1.3 (SEQ ID NO:214); SF-G1-M27 (SEQ ID NO:216); SF-G1-P6 (SEQ ID NO:218); SF-G1-B69 (SEQ ID NO:220); P4-G1-C8 (SEQ ID NO:222); P4-G1-P1 (SEQ ID NO:224); P4-G1-M1.3 (SEQ ID NO:226); P4-G1-M27 (SEQ ID NO:228); P4-G1-P6 (SEQ ID NO:230); P4-G1-B69 (SEQ ID NO:232); M78-G1-C8 (SEQ ID NO:234); M78-G1-P1 (SEQ ID NO:236); M78-G1-M1.3 (SEQ ID NO:238); M78-G1-M27 (SEQ ID NO:240); M78-G1-P6 (SEQ ID NO:242); M78-G1-B69 (SEQ ID NO:244); M57-G1-C8 (SEQ ID NO:246); M57-G1-P1 (SEQ ID NO:248); M57-G1-M1.3 (SEQ ID NO:250); M57-G1-M27 (SEQ ID NO:252); M57-G1-P6 (SEQ ID NO:254) and M57-G1-B69 (SEQ ID NO:256) and each light chain of the PBA comprises an aa sequence selected from the group consisting of SF kappa light chain (SEQ ID NO:202); P4 kappa light chain (SEQ ID NO:204); M78 kappa light chain (SEQ ID NO:206); and M57 kappa light chain (SEQ ID NO:208); or (b) each heavy chain of a PBA comprises an aa sequence selected from the group consisting of SF-G1-P1 (SEQ ID NO:212); SF-G1-M1.3 (SEQ ID NO:214); SF-G1-M27 (SEQ ID NO:216); SF-G1-P6 (SEQ ID NO:218); SF-G1-B69 (SEQ ID NO:220); P4-G1-C8 (SEQ ID NO:222); P4-G1-P1 (SEQ ID NO:224); P4-G1-M1.3 (SEQ ID NO:226); P4-G1-M27 (SEQ ID NO:228); P4-G1-P6 (SEQ ID NO:230); P4-G1-B69 (SEQ ID NO:232); M78-G1-C8 (SEQ ID NO:234); M78-G1-P1 (SEQ ID NO:236); M78-G1-M1.3 (SEQ ID NO:238); M78-G1-M27 (SEQ ID NO:240); M78-G1-P6 (SEQ ID NO:242); M78-G1-B69 (SEQ ID NO:244); M57-G1-C8 (SEQ ID NO:246); M57-G1-P1 (SEQ ID NO:248); M57-G1-M1.3 (SEQ ID NO:250); M57-G1-M27 (SEQ ID NO:252); M57-G1-P6 (SEQ ID NO:254) and M57-G1-B69 (SEQ ID NO:256); and each light chain of the PBA comprises an aa sequence differing in at least one aa addition, deletion or substitution from an aa sequence selected from the group consisting of SF kappa light chain (SEQ ID NO:202); P4 kappa light chain (SEQ ID NO:204); M78 kappa light chain (SEQ ID NO:206); and M57 kappa light chain (SEQ ID NO:208); or (c) each heavy chain of a PBA comprises an aa sequence differing in at least one aa addition, deletion or substitution from an aa sequence selected from the group consisting of P1-G1-P4 (SEQ ID NO:268); P1-G1-M57 (SEQ ID NO:270); P1-G1-M78 (SEQ ID NO:272); M27-G1-P4 (SEQ ID NO:274); M27-G1-M57 (SEQ ID NO:276); M27-G1-M78 (SEQ ID NO:278); M7-G1-P4 (SEQ ID NO:280); M7-G1-M57 ((SEQ ID NO:282); M7-G1-M78 (SEQ ID NO:284); B72-G1-P4 (SEQ ID NO:286); B72-G1-M57 (SEQ ID NO:288); B72-G1-M78 (SEQ ID NO:290); B60-G1-P4 (SEQ ID NO:292); B60-G1-M57 (SEQ ID NO:294); B60-G1-M78 (SEQ ID NO:296); B60-G2-M78 (SEQ ID NO:355) and M7-G2-M78 (SEQ ID NO:357) and each light chain of the PBA comprises an aa sequence selected from the group consisting of P1 lambda light chain (SEQ ID NO:258); M27 lambda light chain (SEQ ID NO:260); M7 lambda light chain (SEQ ID NO:262); B72 lambda light chain (SEQ ID NO:264); and B60 lambda light chain (SEQ ID NO:266); or (d) each heavy chain of a PBA comprises an aa sequence selected from the group consisting of P1-G1-P4 (SEQ ID NO:268); P1-G1-M57 (SEQ ID NO:270); P1-G1-M78 (SEQ ID NO:272); M27-G1-P4 (SEQ ID NO:274); M27-G1-M57 (SEQ ID NO:276); M27-G1-M78 (SEQ ID NO:278); M7-G1-P4 (SEQ ID NO:280); M7-G1-M57 ((SEQ ID NO:282); M7-G1-M78 (SEQ ID NO:284); B72-G1-P4 (SEQ ID NO:286); B72-G1-M57 (SEQ ID NO:288); B72-G1-M78 (SEQ ID NO:290); B60-G1-P4 (SEQ ID NO:292); B60-G1-M57 (SEQ ID NO:294); B60-G1-M78 (SEQ ID NO:296); B60-G2-M78 (SEQ ID NO:355) and M7-G2-M78 (SEQ ID NO:357) and each light chain of the PBA comprises an aa sequence differing in at least one aa addition, deletion or substitution from an aa sequence selected from the group consisting of P1 lambda light chain (SEQ ID NO:258); M27 lambda light chain (SEQ ID NO:260); M7 lambda light chain (SEQ ID NO:262); B72 lambda light chain (SEQ ID NO:264); and B60 lambda light chain (SEQ ID NO:266), wherein the PBA differs from 16F in at least one aa, CDR or variable domain.

[0145] In certain embodiments, (a) each heavy chain of a PBA, bound to the other heavy chain of the PBA by at least one bond, comprises an aa sequence that is at least 90% identical to one of the following aa sequences or differs from one of the following aa sequences in 1-30 aa substitutions, deletions and/or additions: SF-G1-P1 (SEQ ID NO:212); SF-G1-M1.3 (SEQ ID NO:214); SF-G1-M27 (SEQ ID NO:216); SF-G1-P6 (SEQ ID NO:218); SF-G1-B69 (SEQ ID NO:220); P4-G1-C8 (SEQ ID NO:222); P4-G1-P1 (SEQ ID NO:224); P4-G1-M1.3 (SEQ ID NO:226); P4-G1-M27 (SEQ ID NO:228); P4-G1-P6 (SEQ ID NO:230); P4-G1-B69 (SEQ ID NO:232); M78-G1-C8 (SEQ ID NO:234); M78-G1-P1 (SEQ ID NO:236); M78-G1-M1.3 (SEQ ID NO:238); M78-G1-M27 (SEQ ID NO:240); M78-G1-P6 (SEQ ID NO:242); M78-G1-B69 (SEQ ID NO:244); M57-G1-C8 (SEQ ID NO:246); M57-G1-P1 (SEQ ID NO:248); M57-G1-M1.3 (SEQ ID NO:250); M57-G1-M27 (SEQ ID NO:252); M57-G1-P6 (SEQ ID NO:254) and M57-G1-B69 (SEQ ID NO:256) and (b) each light chain of the PBA, bound to one heavy chain of (a) by at least one bond, comprises an aa sequence that is at least 90% identical to one of the following aa sequences or differs from one of the following aa sequences in 1-30 aa substitutions, deletions and/or additions: SF kappa light chain (SEQ ID NO:202); P4 kappa light chain (SEQ ID NO:204); M78 kappa light chain (SEQ ID NO:206); and M57 kappa light chain (SEQ ID NO:208); or (c) each heavy chain of a PBA, bound to the other heavy chain of the PBA by at least one bond, comprises an aa sequence that is at least 90% identical to one of the following aa sequences or differs from one of the following aa sequences in 1-30 aa substitutions, deletions and/or additions: P1-G1-P4 (SEQ ID NO:268); P1-G1-M57 (SEQ ID NO:270); P1-G1-M78 (SEQ ID NO:272); M27-G1-P4 (SEQ ID NO:274); M27-G1-M57 (SEQ ID NO:276); M27-G1-M78 (SEQ ID NO:278); M7-G1-P4 (SEQ ID NO:280); M7-G1-M57 ((SEQ ID NO:282); M7-G1-M78 (SEQ ID NO:284); B72-G1-P4 (SEQ ID NO:286); B72-G1-M57 (SEQ ID NO:288); B72-G1-M78 (SEQ ID NO:290); B60-G1-P4 (SEQ ID NO:292); B60-G1-M57 (SEQ ID NO:294); and B60-G1-M78 (SEQ ID NO:296)); B60-G2-M78 (SEQ ID NO:355) and M7-G2-M78 (SEQ ID NO:357) and (d) each light chain of the PBA, bound to one heavy chain of (c) by at least one bond, comprises an aa sequence that is at least 90% identical to one of the following aa sequences or which differs from one of the following aa sequences in 1-30 aa substitutions, deletions and/or additions: P1 lambda light chain (SEQ ID NO:258); M27 lambda light chain (SEQ ID NO:260); M7 lambda light chain (SEQ ID NO:262); B72 lambda light chain (SEQ ID NO:264); and B60 lambda light chain (SEQ ID NO:266).

[0146] In certain embodiments, (a) each heavy chain of a PBA comprises an aa sequence that is at least 95% identical to one of the following aa sequence or differs from one of the following aa sequences in 1-10 aa substitutions, deletions and/or additions: SF-G1-P1 (SEQ ID NO:212); SF-G1-M1.3 (SEQ ID NO:214); SF-G1-M27 (SEQ ID NO:216); SF-G1-P6 (SEQ ID NO:218); SF-G1-B69 (SEQ ID NO:220); P4-G1-C8 (SEQ ID NO:222); P4-G1-P1 (SEQ ID NO:224); P4-G1-M1.3 (SEQ ID NO:226); P4-G1-M27 (SEQ ID NO:228); P4-G1-P6 (SEQ ID NO:230); P4-G1-B69 (SEQ ID NO:232); M78-G1-C8 (SEQ ID NO:234); M78-G1-P1 (SEQ ID NO:236); M78-G1-M1.3 (SEQ ID NO:238); M78-G1-M27 (SEQ ID NO:240); M78-G1-P6 (SEQ ID NO:242); M78-G1-B69 (SEQ ID NO:244); M57-G1-C8 (SEQ ID NO:246); M57-G1-P1 (SEQ ID NO:248); M57-G1-M1.3 (SEQ ID NO:250); M57-G1-M27 (SEQ ID NO:252); M57-G1-P6 (SEQ ID NO:254) and M57-G1-B69 (SEQ ID NO:256), and (b) each light chain of the PBA comprises an aa sequence that is at least 95% identical to one of the following aa sequences or differs from one of the following aa sequences in 1-10 aa substitutions, deletions and/or additions: SF kappa light chain (SEQ ID NO:202); P4 kappa light chain (SEQ ID NO:204); M78 kappa light chain (SEQ ID NO:206); and M57 kappa light chain (SEQ ID NO:208); or (c) each heavy chain of a PBA comprises an aa sequence that is at least 95% identical to one of the following aa sequences or differs from one of the following aa sequences in 1-10 aa substitutions, deletions and/or additions: P1-G1-P4 (SEQ ID NO:268); P1-G1-M57 (SEQ ID NO:270); P1-G1-M78 (SEQ ID NO:272); M27-G1-P4 (SEQ ID NO:274); M27-G1-M57 (SEQ ID NO:276); M27-G1-M78 (SEQ ID NO:278); M7-G1-P4 (SEQ ID NO:280); M7-G1-M57 ((SEQ ID NO:282); M7-G1-M78 (SEQ ID NO:284); B72-G1-P4 (SEQ ID NO:286); B72-G1-M57 (SEQ ID NO:288); B72-G1-M78 (SEQ ID NO:290); B60-G1-P4 (SEQ ID NO:292); B60-G1-M57 (SEQ ID NO:294); and B60-G1-M78 (SEQ ID NO:296); B60-G2-M78 (SEQ ID NO:355) and M7-G2-M78 (SEQ ID NO:357) and (d) each light chain of the PBA comprises an aa sequence that is at least 95% identical to one of the following aa sequences or differs from one of the following aa sequences in 1-10 aa substitutions, deletions and/or additions: P1 lambda light chain (SEQ ID NO:258); M27 lambda light chain (SEQ ID NO:260); M7 lambda light chain (SEQ ID NO:262); B72 lambda light chain (SEQ ID NO:264); B60 lambda light chain (SEQ ID NO:266).

[0147] Exemplary PBA include the following: (a) an SF-G1-P1 PBA comprising: two heavy chains, each comprising a heavy chain aa sequence of SEQ ID NO:212; and two light chains, each comprising a light chain sequence of SEQ ID NO:202; (b) An SF-G1-M1.3 PBA comprising: two heavy chains, each comprising a heavy chain aa sequence of SEQ ID NO:214; and two light chains, each comprising a light chain aa sequence of SEQ ID NO:202; (c) an SF-G1-M27 PBA comprising: two heavy chains, each comprising a heavy chain aa sequence of SEQ ID NO:216; and two light chains, each comprising a light chain aa sequence of SEQ ID NO:202; (d) an SF-G1-P6 PBA comprising: two heavy chains, each comprising a heavy chain aa sequence of SEQ ID NO:218; and two light chains, each comprising a light chain aa sequence of SEQ ID NO:202; (e) an SF-G1-B69 PBA comprising: two heavy chains, each comprising a heavy chain aa sequence of SEQ ID NO:220; and two light chains, each comprising a light chain aa sequence of SEQ ID NO:202; (f) a P4-G1-C8 PBA comprising: two heavy chains, each comprising a heavy chain aa sequence of SEQ ID NO:222; and two light chains, each comprising a light chain aa sequence of SEQ ID NO:204 (g) a P4-G1-P1 PBA comprising: two heavy chains, each comprising a heavy chain aa sequence of SEQ ID NO:224; and two light chains, each comprising a light chain aa sequence of SEQ ID NO:204; (h) a P4-G1-M1.3 PBA comprising: two heavy chains, each comprising a heavy chain aa sequence of SEQ ID NO:226; and two light chains, each comprising a light chain aa sequence of SEQ ID NO:204; (i) a P4-G1-M27 PBA comprising: two heavy chains, each comprising a heavy chain aa sequence of SEQ ID NO:228; and two light chains, each comprising a light chain aa sequence of SEQ ID NO:204; (j) a P4-G1-P6 PBA comprising: two heavy chains, each comprising a heavy chain aa sequence of SEQ ID NO:230; and two light chains, each comprising a light chain aa sequence of SEQ ID NO:204; (h) a P4-G1-B69 PBA comprising: two heavy chains, each comprising a heavy chain aa sequence of SEQ ID NO:232; and two light chains, each comprising a light chain aa sequence of SEQ ID NO:204; (i) an M78-G1-C8 PBA comprising: two heavy chains, each comprising a heavy chain aa sequence of SEQ ID NO:234; and two light chains, each comprising a light chain aa sequence of SEQ ID NO:206; (j) an M78-G1-P1 PBA comprising: two heavy chains, each comprising a heavy chain aa sequence of SEQ ID NO:236; and two light chains, each comprising a light chain aa sequence of SEQ ID NO:206; (k) an M78-G1-M1.3 PBA comprising: two heavy chains, each comprising a heavy chain aa sequence of SEQ ID NO:238; and two light chains, each comprising a light chain aa sequence of SEQ ID NO:206; (l) an M78-G1-M27 PBA comprising: two heavy chains, each comprising a heavy chain aa sequence of SEQ ID NO:240; and two light chains, each comprising a light chain aa sequence of SEQ ID NO:206; (m) an M78-G1-P6 PBA comprising: two heavy chains, each comprising a heavy chain aa sequence of SEQ ID NO:242; and two light chains, each comprising a light chain aa sequence of SEQ ID NO:206; (n) an M78-G1-B69 PBA comprising: two heavy chains, each comprising a heavy chain aa sequence of SEQ ID NO:244; and two light chains, each comprising a light chain aa sequence of SEQ ID NO:206; (o) an M57-G1-C8 PBA comprising: two heavy chains, each comprising a heavy chain aa sequence of SEQ ID NO:246; and two light chains, each comprising a light chain aa sequence of SEQ ID NO:208; (p) an M57-G1-P1 PBA comprising: two heavy chains, each comprising a heavy chain aa sequence of SEQ ID NO:248; and two light chains, each comprising a light chain aa sequence of SEQ ID NO:208; (r) an M57-G1-M1.3 PBA comprising: two heavy chains, each comprising a heavy chain aa sequence of SEQ ID NO:250; and two light chains, each comprising a light chain aa sequence of SEQ ID NO:208; (s) an M57-G1-M27 PBA comprising: two heavy chains, each comprising a heavy chain aa sequence of SEQ ID NO:252; and two light chains, each comprising a light chain aa sequence of SEQ ID NO:208; (t) an M57-G1-P6 PBA comprising: two heavy chains, each comprising a heavy chain aa sequence of SEQ ID NO:254; and two light chains, each comprising a light chain aa sequence of SEQ ID NO:208; (u) an M57-G1-B69 PBA comprising: two heavy chains, each comprising a heavy chain aa sequence of SEQ ID NO:256; and two light chains, each comprising a light chain aa sequence of SEQ ID NO:208; (v) a P1-G1-P4 PBA comprising: two heavy chains, each comprising a heavy chain aa sequence of SEQ ID NO:268; and two light chains, each comprising a light chain aa sequence of SEQ ID NO:258; (w) a P1-G1-M57 PBA comprising: two heavy chains, each comprising a heavy chain aa sequence of SEQ ID NO:270; and two light chains, each comprising a light chain aa sequence of SEQ ID NO:258; (x) a P1-G1-M78 PBA comprising: two heavy chains, each comprising a heavy chain aa sequence of SEQ ID NO:272; and two light chains, each comprising a light chain aa sequence of SEQ ID NO:258; (y) an M27-G1-P4 PBA comprising: two heavy chains, each comprising a heavy chain aa sequence of SEQ ID NO:274; and two light chains, each comprising a light chain aa sequence of SEQ ID NO:260; (z) an M27-G1-M57 PBA comprising: two heavy chains, each comprising a heavy chain aa sequence of SEQ ID NO:276; and two light chains, each comprising a light chain aa sequence of SEQ ID NO:260; (aa) an M27-G1-M78 PBA comprising: two heavy chains, each comprising a heavy chain aa sequence of SEQ ID NO:278; and two light chains, each comprising a light chain aa sequence of SEQ ID NO:260; (ab) an M7-G1-P4 PBA comprising: two heavy chains, each comprising a heavy chain aa sequence of SEQ ID NO:280; and two light chains, each comprising a light chain aa sequence of SEQ ID NO:262; (ac) an M7-G1-M57 PBA comprising: two heavy chains, each comprising a heavy chain aa sequence of SEQ ID NO:282; and two light chains, each comprising a light chain aa sequence of SEQ ID NO:262; (ad) an M7-G1-M78 PBA comprising: two heavy chains, each comprising a heavy chain aa sequence of SEQ ID NO:284; and two light chains, each comprising a light chain aa sequence of SEQ ID NO:262; (ae) a B72-G1-P4 PBA comprising: two heavy chains, each comprising a heavy chain aa sequence of SEQ ID NO:286; and two light chains, each comprising a light chain aa sequence of SEQ ID NO:264; (af) a B72-G1-M57 PBA comprising: two heavy chains, each comprising a heavy chain aa sequence of SEQ ID NO:288; and two light chains, each comprising a light chain aa sequence of SEQ ID NO:264; (ag) a B72-G1-M78 PBA comprising: two heavy chains, each comprising a heavy chain aa sequence of SEQ ID NO:290; and two light chains, each comprising a light chain aa sequence of SEQ ID NO:264; (ah) a B60-G1-P4 PBA comprising: two heavy chains, each comprising a heavy chain aa sequence of SEQ ID NO:292; and two light chains, each comprising a light chain aa sequence of SEQ ID NO:266; (ai) a B60-G1-M57 PBA comprising: two heavy chains, each comprising a heavy chain aa sequence of SEQ ID NO:294; and two light chains, each comprising a light chain aa sequence of SEQ ID NO:266; and (aj) a B60-G1-M78 PBA comprising: two heavy chains, each comprising a heavy chain aa sequence of SEQ ID NO:296; and two light chains, each comprising a light chain aa sequence of SEQ ID NO:266.

[0148] Pharmaceutical Compositions

[0149] Compounds useful in the methods of this disclosure can be administered as pharmaceutical compositions by any conventional route, in particular enterally, e.g., orally, e.g., in the form of tablets or capsules, or parenterally, e.g., in the form of injectable solutions or suspensions, topically, e.g., in the form of lotions, gels, ointments or creams, or in a nasal or suppository form. Pharmaceutical compositions comprising a compound useful in the disclosed methods in free form or in a pharmaceutically acceptable salt form in association with at least one pharmaceutically acceptable carrier or diluent can be manufactured in a conventional manner by mixing, granulating or coating methods. For example, oral compositions can be tablets or gelatin capsules comprising the active ingredient together with a) diluents, e.g., lactose, dextrose, sucrose, mannitol, sorbitol, cellulose and/or glycine; b) lubricants, e.g., silica, talcum, stearic acid, its magnesium or calcium salt and/or polyethyleneglycol; for tablets also c) binders, e.g., magnesium aluminum silicate, starch paste, gelatin, tragacanth, methylcellulose, sodium carboxymethylcellulose and or polyvinylpyrrolidone; if desired d) disintegrants, e.g., starches, agar, alginic acid or its sodium salt, or effervescent mixtures; and/or e) absorbents, colorants, flavors and sweeteners. Injectable compositions can be aqueous isotonic solutions or suspensions, and suppositories can be prepared from fatty emulsions or suspensions. The compositions may be sterilized and/or contain adjuvants, such as preserving, stabilizing, wetting or emulsifying agents, solution promoters, salts for regulating the osmotic pressure and/or buffers. In addition, they may also contain other therapeutically valuable substances. Suitable formulations for transdermal applications include an effective amount of a compound with a carrier. A carrier can include absorbable pharmacologically acceptable solvents to assist passage through the skin of the host. For example, transdermal devices are in the form of a bandage comprising a backing member, a reservoir containing the compound optionally with carriers, optionally a rate controlling barrier to deliver the compound to the skin of the host at a controlled and predetermined rate over a prolonged period of time, and means to secure the device to the skin. Matrix transdermal formulations may also be used. Suitable formulations for topical application, e.g., to the skin and eyes, are preferably aqueous solutions, ointments, creams or gels well-known in the art. Such may contain solubilizers, stabilizers, tonicity enhancing agents, buffers and preservatives.

[0150] Compounds useful in the disclosed methods can be administered in therapeutically effective amounts in combination with one or more therapeutic agents (pharmaceutical combinations). Where the compounds are administered in conjunction with other therapies, dosages of the co-administered compounds will of course vary depending on the type of co-drug employed, on the specific drug employed, on the condition being treated and so forth.

[0151] Combination therapy includes administration to the subject compounds in further combination with other biologically active ingredients (such as, but not limited to, a second and different antineoplastic agent) and non-drug therapies (such as, but not limited to, surgery or radiation treatment). For instance, the compounds can be used in combination with other pharmaceutically active compounds, preferably compounds that are able to enhance the effect of the original pharmaceutical combination. The compounds can be administered simultaneously (as a single preparation or separate preparation) or sequentially to the other drug therapy. In general, a combination therapy envisions administration of two or more drugs during a single cycle or course of therapy.

[0152] In certain embodiments, these compositions optionally further comprise one or more additional therapeutic agents. Alternatively, a compound useful in the disclosed methods may be administered to a patient in need thereof in combination with the administration of one or more other therapeutic agents. For example, additional therapeutic agents for conjoint administration or inclusion in a pharmaceutical composition with a compound useful in the disclosed methods are an agent that impedes regulatory T-cell (Treg) activity. The second agent may be selected from, but is not limited to, a small molecule immunomodulatory agent, an immunomodulatory antibody that does not bind human IGF-1, an anticancer vaccine, and a radiation dose.

[0153] It will also be appreciated that the compounds and pharmaceutical compositions useful in the disclosed methods can be used in combination therapies, that is, the compounds and pharmaceutical compositions can be administered concurrently with, prior to, or subsequent to, one or more other desired therapeutics or medical procedures. The particular combination of therapies (therapeutics or procedures) to use in a combination regimen will take into account compatibility of the desired therapeutics and/or procedures and the desired therapeutic effect to be achieved. It will also be appreciated that the therapies used may achieve a desired effect for the same disorder (for example, a compound may be administered concurrently with another anticancer agent), or they may achieve different effects (e.g., control of any adverse effects).

[0154] For example, other therapies or anticancer agents that may be used in combination with the compounds useful in the disclosed methods include, but are not limited to, surgery, radiotherapy (e.g., gamma-radiation, neutron beam radiotherapy, electron beam radiotherapy, proton therapy, brachytherapy, and systemic radioactive isotopes), endocrine therapy, biologic response modifiers (e.g., interferons, interleukins, antibodies, aptamers, siRNAs, oligonucleotides, enzyme, ion channel and receptor inhibitors or activators), hyperthermia and cryotherapy, agents to attenuate any adverse effects (e.g., antiemetics), and other approved chemotherapeutic drugs, including, but not limited to, alkylating drugs (e.g., mechlorethamine, chlorambucil, cyclophosphamide, melphalan HCl, ifosfamide), antimetabolites (e.g., methotrexate), purine antagonists and pyrimidine antagonists (e.g., 6-mercaptopurine, 5-fluorouracil, cytarabine (cytosine arabinoside), gemcitabine), spindle poisons (e.g., vinblastine, vincristine, vinorelbine, paclitaxel, nab-paclitaxel), podophyllotoxins (e.g., etoposide, irinotecan, topotecan), antibiotics (e.g., doxorubicin, bleomycin, mitomycin), nitrosoureas (e.g., carmustine, lomustine), inorganic ions (e.g., cisplatin, carboplatin), enzymes (e.g., asparaginase), and hormones (e.g., tamoxifen, leuprolide, flutamide, and megestrol). For a more comprehensive discussion of updated cancer therapies see The Merck Manual, Seventeenth Ed. 1999, the entire contents of which are hereby incorporated by reference. See also the National Cancer Institute (CNI) website (nci.nih.gov) and the Food and Drug Administration (FDA) website for a list of the FDA approved oncology drugs (fda.gov/cder/cancer/dmglistfrarne).

[0155] In certain embodiments, the pharmaceutical compositions useful in the disclosed methods further comprise one or more additional therapeutically active ingredients (e.g., chemotherapeutic and/or palliative). For purposes of this disclosure, the term “palliative” refers to treatment that is focused on the relief of symptoms of a disease and/or side effects of a therapeutic regimen, but is not curative. For example, palliative treatment encompasses painkillers, anti-nausea medications, anti-pyretics, and anti-sickness drugs. In addition, chemotherapy, radiotherapy and surgery can all be used palliatively (that is, to reduce symptoms without going for cure; e.g., for shrinking tumors and reducing pressure, bleeding, pain and other symptoms of cancer).

[0156] The compounds and compositions can be administered together with hormonal and steroidal anti-inflammatory agents, such as but not limited to, estradiol, conjugated estrogens (e.g., PREMARIN, PREMPRO, AND PREMPHASE), 17 beta estradiol, calcitonin-salmon, levothyroxine, dexamethasone, medroxyprogesterone, prednisone, cortisone, flunisolide, and hydrocortisone; non-steroidal anti-inflammatory agents, such as but not limited to, tramadol, fentanyl, metamizole, ketoprofen, naproxen, nabumetone, ketoralac, tromethamine, loxoprofen, ibuprofen, aspirin, and acetaminophen; anti-TNFalpha antibodies, such as infliximab (REMICADE) and etanercept (ENBREL).

[0157] The pharmaceutical compositions useful in the disclosed methods comprise a therapeutically effective amount of a compound formulated together with one or more pharmaceutically acceptable carriers. As used herein, the term “pharmaceutically acceptable carrier” means a non-toxic, inert solid, semi-solid or liquid filler, diluent, encapsulating material or formulation auxiliary of any type. The pharmaceutical compositions useful in the methods disclosed herein can be administered to humans and other animals orally, rectally, parenterally, intracisternally, intravaginally, intraperitoneally, topically (as by powders, ointments, or drops), buccally, or as an oral or nasal spray.

[0158] According to the disclosed methods of treatment, disorders are treated or prevented in a subject, such as a human patient or other animal, by administering to the subject a therapeutically effective amount of a compound, in such amounts and for such time as is necessary to achieve the desired result.

[0159] In general, compounds useful in the disclosed methods are administered in therapeutically effective amounts via any of the usual and acceptable modes known in the art, either singly or in combination with one or more therapeutic agents. A therapeutically effective amount may vary widely depending on the severity of the disease, the age and relative health of the subject, the potency of the compound used and other factors. Therapeutic amounts or doses also vary depending on route of administration, as well as the possibility of co-usage with other agents.

[0160] Dosages

[0161] In some embodiments, the bispecific antibody is administered at one of the following schedules: 6 mg/kg qw, 9 mg/kg qw, 8 mg/kg qw, 10 mg/kg q2w, 12 mg/kg q3w, 18 mg/kg q3w, 20 mg/kg q3w, 30 mg/kg q3w, 20 mg/kg qw, or 40 mg/kg q2w. Alternatively, the bispecific antibody is administered according to the dose schedules outlined in Table 2.

[0162] Biological Samples

[0163] The disclosed methods may involve taking a biological sample from a patient in order to determine the gene mutation status of the sample or the gene expression level status of the sample. For example, the biological sample may be a from a tumor tissue, tumor biopsy, whole blood, blood serum, blood plasma, semen, urine, mucus, or other body sample. In a preferred embodiment, the biological sample is blood serum, blood plasma, tumor tissue, or tumor biopsy sample. Tumor tissue may be formalin-fixed paraffin embedded tumor tissue or fresh frozen tumor tissue.

[0164] Biomarkers

[0165] Methods of detecting many useful biomarkers are well known. Some such useful methods are disclosed in the EXAMPLES below and others may be found in WIPO Publication No. WO 2015/100459; U.S. Pat. No. 8,623,592; WIPO Publication No. WO/2016/054414, and U.S. patent application Ser. No. 14/967,158, each of which is incorporated by reference in its entirety. Biomarkers useful for the present disclosure include, but are not limited to, those biomarkers that are used in the recognition of, for diagnosis of, or for determining the prognosis of one or more of the following disorders: cancer, myeloma, pancreatic cancer, ovarian cancer, hepatocellular carcinoma, parathyroid cancer, sarcoma, lung cancer, colon carcinoma, B-cell lymphoma, and breast cancer. Biomarker levels may be assessed using a biological sample by any method known in the art, which may include but is not limited to RT-PCR (reverse transcription polymerase chain reaction), PCR-ISH (polymerase chain reaction in situ hybridization), and RNA-ISH (RNA in situ hybridization). For example, the patient to be evaluated for using the methods disclosed herein may be selected for treatment by assessing a biomarker level in a biopsy of the cancer and the patient may then treated with the bispecific antibody if the biopsy exhibits a level that is predictive of a favorable response to the treatment. In various embodiments of this aspect, the biomarker is 1) fraction of IGF-1R positive regulatory T cells, 2) fraction of IGF-1R positive cytotoxic T cells, or 3) the ratio of 1) to 2); and the level that is predictive of a favorable response to the treatment is where 1) or 2) or 3) is higher than the fraction or ratio corresponding to a population median level of patients with the cancer. In other embodiments, the biomarker is serum free IGF-1 and the level that is predictive of a favorable response to the treatment is where the patient's serum free IGF-1 concentration is higher than a population median level of patients with the cancer. In yet other embodiments of this aspect, the biomarker is biopsy heregulin level and the level that is predictive of a favorable response to the treatment is where the biopsy heregulin level is higher than a population median biopsy heregulin level of patients with the cancer; or the biomarker is biopsy heregulin level and the level that is predictive of a favorable response to the treatment is a biopsy heregulin level that is sufficient to be detectable by RT-PCR; or the biomarker is biopsy heregulin level and the level that is predictive of a favorable response to the treatment is a biopsy heregulin level that sufficient to be detectable by RNA-ISH.

[0166] Kits

[0167] Also provided herein are kits for use in the disclosed methods. In one embodiment, the kit comprises a first agent that is a bispecific anti-IGF-1R/anti-ErbB3 antibody that immunospecifically binds to human ErbB3 and to the extracellular domain of human IGF-1R (CD221), a second agent that impedes regulatory T cell activity, and instructions for use. The second agent may be selected from one or more of: a small molecule immunomodulatory agent, an immunomodulatory antibody that does not bind human IGF-1, and an anticancer vaccine. The immunomodulatory antibody of the kit may be one or more antibody selected from the group consisting of (a) an agonistic anti-receptor antibody that immunospecifically binds human OX40, CD40, GITR, CD27, ICOS, or 4-1BB; (b) an antagonistic anti-receptor antibody that immunospecifically binds human CTLA-4, PD-1, PD-L1, TIM-3, BTLA, VISTA, LAG-3, KIR, CD47, CD25, B7-H3, or B7-H4; and (c) an anti-ligand antibody that blocks function of IL-6, IL-10, TGFβ, angiopoetin-2, VEGF, IL-17, IL-23, or TNFα. In one embodiment, the anti-CTLA-4 antibody is ipilimumab or tremelimumab. In another embodiment, the anti-PD-1 antibody is selected from the group consisting of nivolumab, pembrolizumab, and pidilizumab. In another embodiment, the anti-PD-L1 antibody is selected from the group consisting of atezolizumab, durvalumab, and avelumab.

[0168] The anti-KIR antibody may be lirilumab. The anticancer vaccine may be selected from the group consisting of OncoVex, MAGE-A3, PROSTVAC, GVAX, CDX110, CDX1307, CDX1401, CV9104, BIOVAXID, IMA 901 and ADXS11-001.

### Illustrative Additional Embodiments

[0169] Non-limiting examples of certain embodiments are provided below:
[0170] 1. A method of treating cancer in a patient, comprising administering to the patient an effective amount of a first agent that is a bispecific anti-IGF-1R/anti-ErbB3 antibody that immunospecifically binds to human ErbB3 and to the extracellular domain of human IGF-1R (CD221), and a second agent that impedes regulatory T cell activity, wherein the cancer is treated.
[0171] 2. The method of embodiment 1, wherein the first agent binding to IGF-1R inhibits IGF-1-mediated activation of human IGF-1R.
[0172] 3. The method of embodiment 1 or 2, wherein the effective amount of the first agent exerts at least one effect selected from the group consisting of (a) inhibiting proliferation of IGF-1R ligand-dependent and/or IGF-1R ligand-independent IGF-1R expressing immune cells; (b) inhibiting differentiation of IGF-1R expressing immune progenitor cells into T cells, NKT cells, or NK cells; and (c) depleting IGF-1R expressing immune cells.
[0173] 4. The method of any one of embodiments 1-3, wherein the second agent is selected from the group consisting of a small molecule immunomodulatory agent, an immunomodulatory antibody that does not bind human IGF1, an anticancer vaccine, and a radiation dose.
[0174] 5. The method of any one of embodiments 1-3, wherein the immunomodulatory antibody is at least one selected from the group consisting of (a) an agonistic anti-receptor antibody that immunospecifically binds human OX40, CD40, GITR, CD27, ICOS, or 4-1BB; (b) an antagonistic anti-receptor antibody that immunospecifically binds human CTLA-4, PD-1, PD-L1, TIM-3, BTLA, VISTA, LAG-3, KIR, CD47, CD25, B7-H3, or B7-H4; and (c) an anti-ligand antibody that blocks function of IL-6, IL-10, TGFβ, angiopoetin-2, VEGF, IL-17, IL-23, or TNFα.
[0175] 6. The method of embodiment 5, wherein the anti-CTLA-4 antibody is ipilimumab or tremelimumab.
[0176] 7. The method of embodiment 5, wherein the anti-PD-1 antibody is selected from the group consisting of nivolumab, pembrolizumab, and pidilizumab.
[0177] 8. The method of embodiment 5, wherein the anti-PD-L1 antibody is selected from the group consisting of atezolizumab, durvalumab, and avelumab.
[0178] 9. The method of embodiment 5, wherein the anti-KIR antibody is lirilumab.
[0179] 10. The method of embodiment 4, wherein the anticancer vaccine is selected from the group consisting of OncoVex, MAGE-A3, PROSTVAC, GVAX, CDX110, CDX1307, CDX1401, CV9104, BIOVAXID, IMA 901 and ADXS11-001.
[0180] 11. The method of embodiment 1, wherein the first agent is selected from the group consisting of istiratumab (P4-G1-M1.3), SF-G1-P1, SF-G1-M1.3, SF-G1-M27, SF-G1-P6, SF-G1-B69, P4-G1-C8, P4-G1-P1, P4-G1-M27, P4-G1-P6, P4-G1-B69, M78-G1-C8, M78-G1-P1, M78-G1-M1.3, M78-G1-M27, M78-G1-P6, M78-G1-B69, M57-G1-C8, M57-G1-P1, M57-G1-M1.3, M57-G1-M27, M57-G1-P6, M57-G1-B69, P1-G1-P4, P1-G1-M57, P1-G1-M78, M27-G1-P4, M27-G1-M57, M27-G1-M78, M7-G1-P4, M7-G1-M57, M7-G1-M78, B72-G1-P4, B72-G1-M57, B72-G1-M78, B60-G1-P4, B60-G1-M57, B60-G1-M78, P4M-G1-M1.3, P4M-G1-C8, P33M-G1-M1.3, P33M-G1-C8, P4M-G1-P6L, P33M-G1-P6L, and P1-G1-M76.
[0181] 12. The method of any of embodiments 1-12, wherein the first agent is administered intravenously or subcutaneously.
[0182] 13. The method of any of embodiments 1-13, wherein the first agent is administered intravenously at 6 mg/kg once weekly, 9 mg/kg once weekly, 8 mg/kg once weekly, 10 mg/kg every two weeks, 12 mg/kg every three weeks, 18 mg/kg every three weeks, 20 mg/kg every three weeks, 30 mg/kg every three weeks, 20 mg/kg once weekly, or 40 mg/kg every two weeks.
[0183] 14. The method of embodiment 1, wherein the first agent has been engineered to increase or decrease Fc receptor binding.
[0184] 15. The method of any of the preceding embodiments, wherein the first agent preferentially binds to regulatory T cells compared to CD8 positive (CD8+) cytotoxic T cells.
[0185] 16. The method of embodiment 15, wherein the regulatory T cells are CD4 positive (CD4+) and either or both of CD25 positive (CD25+) and FoxP3 positive (FoxP3+).
[0186] 17. The method of any of the preceding embodiments, wherein the patient is selected by assessing a biomarker level in a biopsy of the cancer, and the patient is treated if the biopsy exhibits a level that is predictive of treatment responsiveness.
[0187] 18. The method of embodiment 17, wherein the biomarker is (a) fraction of IGF-1R positive regulatory T cells, (b) fraction of IGF-1R positive cytotoxic T cells, or (c) a ratio of (a) to (b); and a level that is predictive of treatment responsiveness is where (a) or (b) or (c) is higher than the fraction (a), fraction (b) or ratio of (a) to (b) corresponding to a population median level of patients with the cancer.
[0188] 19. The method of embodiment 17 or 18, wherein the biomarker is serum free IGF-1 (i.e., free IGF-1 from the patient's serum), and the level that is predictive of treatment responsiveness is where the patient's serum free IGF-1 concentration is higher than a population median level of patients with the cancer.
[0189] 20. The method of any one of embodiments 17-19, wherein the biomarker is biopsy heregulin level, and the level that is predictive of treatment responsiveness is where the biopsy heregulin level is higher than a population median biopsy heregulin level of patients with the cancer.
[0190] 21. The method of any one of embodiments 17-20, wherein the biomarker is biopsy heregulin level, and the level that is predictive of treatment responsiveness is a biopsy heregulin level that is sufficient to be detectable by RT-PCR.
[0191] 22. The method of any one of embodiments 17-20, wherein the biomarker is biopsy heregulin level, and the level that is predictive of treatment responsiveness is a biopsy heregulin level that is sufficient to be detectable by RNA-ISH.
[0192] 23. The method of any of the preceding embodiments, wherein the cancer is selected from the group consisting of myeloma, pancreatic cancer, ovarian cancer, hepatocellular carcinoma, parathyroid cancer, sarcoma, lung cancer, colon carcinoma, B-cell lymphoma, and breast cancer.
[0193] 24. The method of embodiment 1, wherein the first agent is istiratumab, the second agent is an anti-PD-L1 antibody, and the cancer is selected from the group consisting of pancreatic cancer, ovarian cancer, hepatocellular carcinoma, parathyroid cancer, sarcoma, lung cancer, colon carcinoma, B cell lymphoma, and breast cancer.
[0194] 25. The method of embodiment 24, wherein the anti-PD-L1 antibody is atezolizumab (MPDL3280a), and the cancer is colon carcinoma.
[0195] 26. The method of embodiment 1, wherein the first agent is istiratumab, the second agent is an anti-CTLA-4 antibody, and the cancer is melanoma.
[0196] 27. The method of any of the preceding embodiments, wherein administration of the first agent and second agent in combination more effectively treats the cancer than when each of the first and second agent is administered as monotherapy at a same amount as the combination.
[0197] 28. A method of treating a cancer in a patient comprising administering an effective amount of a bispecific anti-IGF-1R/anti-ErbB3 antibody that immunospecifically binds to human ErbB3 and to the extracellular domain of human IGF-1R (CD221) to the patient, wherein the cancer is treated, and wherein the cancer is selected from the group consisting of pancreatic cancer, ovarian cancer, hepatocellular carcinoma, parathyroid cancer, sarcoma, lung cancer and breast cancer.
[0198] 29. The method of embodiment 28, wherein the administering of the bispecific antibody correlates with reduced expression of IGF-1R on splenocyte-derived regulatory T cells, but not in CD8+ T cells.
[0199] 30. The method of embodiment 28, wherein the administering of the bispecific antibody correlates with reduced proliferation of regulatory T cells.
[0200] 31. The method of any of embodiments 28-30 wherein the bispecific antibody is selected from the group consisting of istiratumab (P4-G1-M1.3), SF-G1-P1, SF-G1-M1.3, SF-G1-M27, SF-G1-P6, SF-G1-B69, P4-G1-C8, P4-G1-P1, P4-G1-M27, P4-G1-P6, P4-G1-B69, M78-G1-C8, M78-G1-P1, M78-G1-M1.3, M78-G1-M27, M78-G1-P6, M78-G1-B69, M57-G1-C8, M57-G1-P1, M57-G1-M1.3, M57-G1-M27, M57-G1-P6, M57-G1-B69, P1-G1-P4, P1-G1-M57, P1-G1-M78, M27-G1-P4, M27-G1-M57, M27-G1-M78, M7-G1-P4, M7-G1-M57, M7-G1-M78, B72-G1-P4, B72-G1-M57, B72-G1-M78, B60-G1-P4, B60-G1-M57, B60-G1-M78, P4M-G1-M1.3, P4M-G1-C8, P33M-G1-M1.3, P33M-G1-C8, P4M-G1-P6L, P33M-G1-P6L, and P1-G1-M76.
[0201] 32. The method of embodiment 31, wherein the bispecific antibody is istiratumab.
[0202] 33. A method of recruiting antitumor activity of innate immune cells (non-T cells) and T cells to a tumor in a patient, comprising administering to the patient an effective amount of a bispecific anti-IGF-1R/anti-ErbB3 antibody that immunospecifically binds to human ErbB3 and to the extracellular domain of human IGF-1R (CD221) to the patient, wherein antitumor activity of innate immune cells and T cells is recruited to the tumor.
[0203] 34. The method of embodiment 33, wherein the tumor does not express IGFR-1 or ErbB3 receptors.
[0204] 35. The method of embodiment 33 or 34, wherein the tumor is a B cell lymphoma tumor.
[0205] 36. The method of any of embodiments 33-35, wherein the bispecific antibody is selected from the group consisting of istiratumab (P4-G1-M1.3), SF-G1-P1, SF-G1-M1.3, SF-G1-M27, SF-G1-P6, SF-G1-B69, P4-G1-C8, P4-G1-P1, P4-G1-M27, P4-G1-P6, P4-G1-B69, M78-G1-C8, M78-G1-P1, M78-G1-M1.3, M78-G1-M27, M78-G1-P6, M78-G1-B69, M57-G1-C8, M57-G1-P1, M57-G1-M1.3, M57-G1-M27, M57-G1-P6, M57-G1-B69, P1-G1-P4, P1-G1-M57, P1-G1-M78, M27-G1-P4, M27-G1-M57, M27-G1-M78, M7-G1-P4, M7-G1-M57, M7-G1-M78, B72-G1-P4, B72-G1-M57, B72-G1-M78, B60-G1-P4, B60-G1-M57, B60-G1-M78, P4M-G1-M1.3, P4M-G1-C8, P33M-G1-M1.3, P33M-G1-C8, P4M-G1-P6L, P33M-G1-P6L, and P1-G1-M76.
[0206] 37. The method of any one of embodiments 33-36, wherein the bispecific antibody is istiratumab.
[0207] 38. A kit, comprising a first agent that is a bispecific anti-IGF-1R/anti-ErbB3 antibody that immunospecifically binds to human ErbB3 and to the extracellular domain of human IGF-1R (CD221), a second agent that impedes regulatory T cell activity, and instructions for use.
[0208] 39. The kit of embodiment 38, wherein the first agent is selected from the group consisting of istiratumab (P4-G1-M1.3), SF-G1-P1, SF-G1-M1.3, SF-G1-M27, SF-G1-P6, SF-G1-B69, P4-G1-C8, P4-G1-P1, P4-G1-M27, P4-G1-P6, P4-G1-B69, M78-G1-C8, M78-G1-P1, M78-G1-M1.3, M78-G1-M27, M78-G1-P6, M78-G1-B69, M57-G1-C8, M57-G1-P1, M57-G1-M1.3, M57-G1-M27, M57-G1-P6, M57-G1-B69, P1-G1-P4, P1-G1-M57, P1-G1-M78, M27-G1-P4, M27-G1-M57, M27-G1-M78, M7-G1-P4, M7-G1-M57, M7-G1-M78, B72-G1-P4, B72-G1-M57, B72-G1-M78, B60-G1-P4, B60-G1-M57, B60-G1-M78, P4M-G1-M1.3, P4M-G1-C8, P33M-G1-M1.3, P33M-G1-C8, P4M-G1-P6L, P33M-G1-P6L, and P1-G1-M76.
[0209] 40. The kit of embodiment 39, wherein the second agent is selected from the group consisting of a small molecule immunomodulatory agent, an immunomodulatory antibody that does not bind human IGF1, and an anticancer vaccine.
[0210] 41. The kit of embodiment 40, wherein the immunomodulatory antibody is at least one selected from the group consisting of (a) an agonistic anti-receptor antibody that immunospecifically binds human OX40, CD40, GITR, CD27, ICOS, or 4-1BB; (b) an antagonistic anti-receptor antibody that immunospecifically binds human CTLA-4, PD-1, PD-L1, TIM-3, BTLA, VISTA, LAG-3, KIR, CD47, CD25, B7-H3, or B7-H4; and (c) an anti-ligand antibody that blocks function of IL-6, IL-10, TGFβ, angiopoetin-2, VEGF, IL-17, IL-23, or TNFα.
[0211] 42. The kit of embodiment 41, wherein the anti-CTLA-4 antibody is ipilimumab or tremelimumab.
[0212] 43. The kit of embodiment 41, wherein the anti-PD-1 antibody is selected from the group consisting of nivolumab, pembrolizumab, and pidilizumab.
[0213] 44. The kit of embodiment 41, wherein the anti-PD-L1 antibody is selected from the group consisting of atezolizumab, durvalumab, and avelumab.
[0214] 45. The kit of embodiment 41, wherein the anti-KIR antibody is lirilumab.
[0215] 46. The kit of embodiment 40, wherein the anticancer vaccine is selected from the group consisting of OncoVex, MAGE-A3, PROSTVAC, GVAX, CDX110, CDX1307, CDX1401, CV9104, BIOVAXID, IMA 901 and ADXS11-001.

### EXAMPLES

[0216] The present disclosure is further illustrated by the following examples which should not be construed as further limiting. The contents of Sequence Listing, figures and all references, patents, and published patent applications cited throughout this application are expressly incorporated herein by reference.

### Example 1

[0217] This Example describes the results of treatment of CD4+ T cells with insulin-like growth factor ligand (IGF-1), wherein the treatment of CD4+ T cells with IGF-1 produces a greater percentage of regulatory T cells from CD4+ T cells (Tregs; here identified as CD4+, CD25+, FoxP3+ cells by flow cytometry) and also increases the proliferation of these Tregs in vitro.

[0218] The regulatory T cells (Tregs), formerly known as suppressor T cells, are a subpopulation of T cells which modulate the immune system, suppress immune responses against other cells and maintain tolerance to self-antigens. As used herein, Tregs are defined as CD4+ and either or both of CD25+ and FoxP3+. Tregs are also CD8 negative (CD8-). Tregs and CD8+ T cells (cytotoxic T cells) derived from whole blood from a disease-free human patient express IGF-1R, with greater expression of this receptor on Treg cells compared to CD8+ T cells (FIG. 1). Female C57BL/6 (Charles River Labs) mouse-derived splenocytes also express IGF-1R on the surface of their Tregs (FIG. 2). In addition, treatment of mouse splenocyte-derived CD4+ T cells with IGF-1 led to increased induction of Tregs in vitro. The percentage of Treg cells increased from 0.908% to 3.91% of CD4+ cells treated with 0 and 200 ng/mL IGF-1, respectively (FIG. 3A). Moreover, analyses of proliferation measured by CFSE dilution indicated enhanced proliferation of these Treg populations (FIG. 3B), as indicated by the multiple peaks present in cells treated with IGF-1, which are indicative of cell division. CFSE is a cell-permeant fluorescein-based dye that covalently attaches to cytoplasmic components of cells, resulting in uniform bright fluorescence. Upon cell division, the dye is distributed equally between daughter cells, allowing the resolution of up to eight cycles of cell division by flow cytometry.

[0219] For the quantitative flow cytometry experiments outlined in FIG. 1, human whole blood was collected from disease free patients in non-EDTA containing K2 Vacutainers® and maintained at room temperature until analysis (<24 hours). The white blood cell fraction was isolated from the whole blood by centrifugation over Ficoll-Paque™ (GE Healthcare: Life Sciences) and red blood cells lysed by incubation in ACK buffer (Life Technologies) for 2 minutes. Total cell counts were obtained and aliquots of cells were stained with CD25-PerCp/Cy5.5, CD4-APC/Cy7, CD8-AmCyan, FoxP3-APC, IGF-1R-biotin and streptavidin-Brilliant Violet™ 421. Percent expression of IGF-1R+ Tregs or CD8+ cells was determined by analyzing the percentage of Tregs (CD4+, CD25+, FoxP3+) or CD8+ cells expressing IGF-1R as measured by quantitative flow cytometry (FACS Canto, BD Biosciences). After the acquisition, all gates and data analyses were performed using the FlowJo® 8.7 software (FlowJo, LLC).

[0220] For the quantitative flow cytometry experiments outlined in FIG. 2, spleens were extracted from C57BL/6 mice, homogenized to single cell suspension, and red blood cells lysed by incubation in ACK (Ammonium-Chloride-Potassium) Lysing Buffer (Life Technologies) for 2 minutes. Total cell counts were obtained and aliquots of cells were stained with CD25-Pe/Cy7, CD4-FITC, FoxP3-APC, IGF-1R-biotin and streptavidin-Brilliant Violet™ 421, which is visible in the Pacific Blue channel. All fluorescent antibodies were sourced from BioLegend®. To confirm IGF-1R specific staining, an aliquot of cells was stained with streptavidin-Brilliant Violet™ 421 but without IGF-1R-biotin and used to set the gates for calculations. Percent expression of IGF-1R+ Tregs was determined by analyzing the percentage of Tregs (here identified as CD4+, CD25+, and FoxP3+) expressing IGF-1R as measured by quantitative flow cytometry (FACS Canto, BD Biosciences). After the acquisition, all gates and data analyses were performed using the FlowJo 8.7 software.

[0221] For the induction and proliferation of Tregs in vitro as outlined in FIG. 3, CD4+ T cells were isolated from C57BL/6 mouse spleens as outlined in FIG. 2. These cells were incubated with CFSE (5 μM) for 8 minutes at 37° C., washed and plated at 40,000 cells per well in a 96 well plate in media containing TGF-beta (0.39 nM; R&D Systems), IL-2 (50 ng/mL; R&D Systems), anti-CD3 and anti-CD28 beads (Mouse T activator Dynabeads®, BD) and IGF-1 (R&D Systems; 0, 50, 100 and 200 ng/mL). After 5 days at 37° C., cells were stained with CD25-Pe/Cy7, CD4-APC/Cy7 and FoxP3-APC, and % Tregs of CD4+ cells was measured in all populations of cells treated with different concentrations of IGF-1. Proliferation of Tregs was measured by analyzing the dilution of CFSE label in the FITC channel. After the acquisition, all gates and data analyses were performed using the FlowJo® 8.7 software.

### Example 2

[0222] This Example discloses the results of treatment of splenocytes-derived regulatory T cells (Tregs; defined as CD4+, CD25+, FoxP3+ cells by flow cytometry) with insulin-like growth factor ligand (IGF-1) at different concentrations and the effect of treatment with istiratumab (MM-141), alone or in combination, wherein treatment with IGF-1 ligand results in increased % Tregs in vitro and treatment with istiratumab inhibits this effect.

[0223] As outlined in Example 1, IGF-1 leads to increased induction of Tregs from CD4+ cells as well as increased proliferation of these Treg cells in vitro. Treatment with istiratumab (MM-141) significantly reduced the expression of IGF-1R on mouse splenocyte derived Tregs but not CD8+ T cells (FIG. 4A). As shown in FIG. 4B, Tregs also express low levels of ErbB3, and these levels are unaffected by treatment with istiratumab. Treatment with istiratumab also decreased % Tregs compared to basal levels (no treatment) and counteracted the increase in % Tregs caused by incubation with IGF-1 (100-400 ng/mL; FIG. 5).

[0224] For the experiment relating to FIG. 4, C57BL/6 female mice were inoculated with 10,000 EL4 T lymphoma cells (ATCC® TIB-39) in un-supplemented DMEM medium subcutaneously in the left flank. Mice were divided into two different treatment groups (5 mice/group) and were dosed with PBS (0.2 mL, i.p., q3d) or istiratumab (30 mpk, i.p., q3d) for the duration of the study. Dosing of PBS and istiratumab was initiated on Day 1 post-tumor cell inoculation. Day 26 post-tumor cell inoculation, mice were euthanized and spleens collected, homogenized to single cell suspensions and red blood cells lysed by incubation in ACK buffer (Life Technologies) for 2 minutes. Total cell counts were obtained and aliquots of cells were stained with CD25-Pe/Cy7, CD4-FITC, FoxP3-APC, IGF-1R-biotin and streptavidin-Brilliant Violet™ 421, which is visible in the Pacific Blue channel. All fluorescent antibodies were sourced from BioLegend®. To confirm IGF-1R specific staining, an aliquot of cells was stained without IGF-1R-biotin but containing streptavidin-Brilliant Violet 421 and used to set the gates for calculations. Percent expression of IGF-1R+ Tregs was determined by analyzing the percentage of Tregs (CD4+, CD25+, FoxP3+) expressing IGF-1R as measured by quantitative flow cytometry (FACS Canto, BD Biosciences).

[0225] For the quantitative flow cytometry experiments outlined in FIG. 5, spleens were extracted from female wild-type C57BL/6 mice, homogenized to single cell suspension and red blood cells lysed by incubation in ACK buffer (Life Technologies) for 2 minutes. Cells were stained with CD25-PE and CD4-biotin labelled antibodies, and CD4+CD25+ dual marker positive cells were isolated using an AUTOMACS magnetic cell sorter. Isolated CD4+CD25+ cells were plated at 80,000 cells per well in a 96 well plate in media containing IL-2 (50 ng/mL; R&D Systems) and anti-CD3 and anti-CD28 beads (Mouse T activator Dynabeads®, BD). Where applicable, IGF-1 (0, 100, 200 and 400 ng/mL; R&D Systems) and/or istiratumab (0.5 M) were added. After 5 days at 37° C., cells were stained with antibodies conjugated to fluorescent dyes—CD25-Pe/Cy7 (BioLegend), CD4-APC/Cy7 (BioLegend) and FoxP3-APC (Miltenyi Biotec), and % FoxP3+ cells of CD4+CD25+ cells was measured by flow cytometry. After the acquisition, all gates and data analyses were performed using the FlowJo® 8.7 software.

[0226] Regulatory T cells (Tregs) comprise a subpopulation of T cells that modulate the immune system response to foreign or aberrant cell types and maintain tolerance to self-antigens. The proliferation of mouse splenocyte-derived Tregs is modulated by several co-stimulatory proteins and is also induced by treatment with IGF-1 ligand. As shown in FIG. 5, treatment with istiratumab decreased the percentage of Tregs below basal levels, as measured by flow cytometry. Furthermore, the effect of IGF-1 on % Tregs is eliminated when cells are co-treated with istiratumab.

### Example 3

[0227] This Example describes a method of treatment of cancer (pancreatic cancer, ovarian cancer, hepatocellular carcinoma, parathyroid cancer, sarcoma, B cell lymphoma, lung cancer or breast cancer) with istiratumab. Istiratumab is dosed and administered as described in WIPO Publication No. WO/2015/130554, except that, in accordance with the present disclosure, it is administered as combination therapy with agents not disclosed in WO/2015/130554.

[0228] Treating A20 B cell lymphoma tumor-bearing immuno-competent BALB/c or athymic nude mice with istiratumab monotherapy resulted in reduced tumor volume over time compared to treatment with PBS vehicle control (FIG. 6). Istiratumab monotherapy antitumor activity in athymic mice, which are T cell-deficient, suggests that istiratumab-mediated mechanisms may recruit the antitumor activity of innate (non-T cell) immune cells. Istiratumab antitumor activity in immuno-competent mice, which is greater than in athymic mice, suggests istiratumab-mediated mechanisms also recruit the antitumor activity of T cells, in addition to innate immune cells, since all immune cell sub-types are present and functional in the immuno-competent mice. As outlined in FIG. 7, for MC38 tumor-bearing athymic mice, treatment with istiratumab did not result in significant reduction of tumor volume over the course of treatment. In contrast, treatment of MC38 colon tumor-bearing immuno-competent mice with istiratumab monotherapy resulted in a reduction in tumor volume compared to PBS control. These findings suggest that istiratumab-mediated mechanisms may primarily recruit the antitumor activity of T cells in this model. In FIG. 8, B16-F10 melanoma tumor-bearing immuno-competent and athymic mice treated with istiratumab had reduced tumor volume over time in comparison to PBS-treated mice, suggesting there is the potential for multiple, concurrent, istiratumab-mediated antitumor mechanisms in the B16-F10 melanoma model.

[0229] As indicated in FIG. 6, female BALB/c (wild-type, immuno-competent; solid symbols and lines) or female athymic nude (nu/nu, T cell-deficient; open symbols, dashed lines) mice (10 mice/group) were inoculated subcutaneously with 6×10⁶ A20 B cell lymphoma cells in un-supplemented RPMI 1640 suspension in the left flank. Beginning on Day 4 post-tumor cell inoculation, the BALB/c mice and athymic nude mice were dosed for the duration of the study with PBS (0.2 mL, i.p., q3d; diamonds) or istiratumab (30 mpk, i.p., q3d; triangles) as described. Tumor volume was measured twice weekly.

[0230] For the in vivo study outlined in FIG. 7, female C57BL/6 (wild-type, immuno-competent; solid symbols and lines; 10/group) or female athymic nude (open symbols and dashed lines; 10/group) mice were inoculated subcutaneously with 3×10⁶ MC38 colorectal cells (NCI®) in un-supplemented RPMI 1640 suspension in the left flank. Beginning on Day 4 post-tumor cell inoculation, the C57BL/6 mice and athymic nude mice were dosed for the duration of the study with PBS (0.2 mL. i.p., q3d; diamonds) or istiratumab (30 mpk, i.p., q3d; triangles). Tumor volume was measured twice weekly.

[0231] As outlined in FIG. 8, female C57BL/6 (solid symbols and lines; 5/group) or female athymic nude (open symbols and dashed lines; 10/group) mice were inoculated subcutaneously with 5×10⁵ B16-F10 melanoma cells (ATCC® CRL-6475) in un-supplemented DMEM suspension in the left flank. Beginning on Day 4 post-tumor cell inoculation, the mice were dosed for the duration of the study with PBS (0.2 mL. i.p., q3d; diamonds) or istiratumab (30 mpk, i.p., q3d; triangles). Tumor volume was measured twice weekly.

### Example 4

[0232] This Example describes a method of treatment of cancer (e.g., B cell lymphoma) with a combination of a checkpoint inhibitor and istiratumab, wherein the therapeutic effect of the combination is larger than the therapeutic effect of an immune checkpoint inhibitor or istiratumab alone when each is administered as monotherapy at the same dose as in the combination. Istiratumab is dosed and administered as specified in Example 3, above, and the immune checkpoint inhibitor is dosed and administered as indicated in FIG. 17.

[0233] As indicated in FIG. 9A, A20 B cell lymphoma cells (ATCC® TIB-208) did not express IGF-1R or ErbB3 receptors. As shown in FIG. 9B, dosing with istiratumab in combination with anti-PD-L1 antibody was more active at inhibiting the growth of IGF-1R- and ErbB3-non-expressing A20 B cell lymphoma cell line tumors than dosing with either agent alone. As shown in FIG. 9C, mice that had complete responses (CR; no palpable tumors) to treatment with a combination of istiratumab and anti-PD-L1 did not form tumors following re-inoculation with A20 tumor cells two months after stopping treatment with agents.

[0234] For the immunoblotting experiments detailed in FIG. 9A, A20 cells were plated on 12 well dishes (3×10⁵ cells per well) in 10% serum-containing medium and incubated overnight. Once the cell density had reached approximately 70%, cells were harvested in lysis buffer containing protease and phosphatase inhibitors and analyzed by western blotting.

[0235] For the in vivo study outlined in FIG. 9B, BALB/c female mice were inoculated with 6×10⁶ A20 cells in un-supplemented RPMI 1640 medium subcutaneously in the left flank. Mice were divided into four different treatment groups (10 mice/group) and were dosed with PBS (0.2 mL, i.p., q3d), istiratumab (30 mpk, i.p., q3d), anti-PD-L1 (MPDL3280a/atezolizumab; 200 μg/mouse per dose, i.p., 3 time a week: Monday, Wednesday, Friday), or the combination of istiratumab and anti-PD-L1, each as dosed for the monotherapy, for the duration of the study. Dosing of istiratumab was initiated on Day 1 post-tumor cell inoculation and dosing of anti-PD-L1 was initiated on Day 4 post-tumor cell inoculation. Tumor volume was measured twice weekly. For the re-challenge assay shown in FIG. 9C, the four complete responder (CR) mice treated with anti-PD-L1+istiratumab of FIG. 9B (lower right panel) were re-challenged by inoculation with 10 million A20 cells subcutaneously into the right flank (the flank not previously used). Ten naïve BALB/c female mice were inoculated with 10 million A20 cells at the same time as a comparative control. Tumor volume was measured twice weekly.

### Example 5

[0236] This Example describes a method of treatment of cancer (e.g., fibrosarcoma) with a combination of an antibody of FIG. 17 and istiratumab, wherein the therapeutic effect of the combination is larger than the therapeutic effect of an immune checkpoint inhibitor or istiratumab alone when each is administered as monotherapy at the same dose as in the combination.

[0237] As indicated in FIG. 10A, WEHI164 fibrosarcoma cells (ATCC® CRL-1751) expressed IGF-1R and ErbB3 receptors. As shown in FIG. 10B, dosing with istiratumab in combination with anti-PD-L1 antibody was more active at inhibiting the growth of IGF-1R- and ErbB3-expressing WEHI164 fibrosarcoma cell line tumors than dosing with either agent alone.

[0238] For the immunoblotting experiments detailed in FIG. 10A, WEHI164 cells were plated on 12 well dishes (3×10⁵ cells per well) in 10% serum-containing medium and incubated overnight. Once the cell density had reached approximately 70%, cells were harvested in lysis buffer containing protease and phosphatase inhibitors and analyzed by western blotting.

[0239] For the in vivo study outlined in FIG. 10B, BALB/c female mice were inoculated with 4.5×10⁶ WEHI164 fibrosarcoma cells in un-supplemented DMEM medium subcutaneously in the left flank. Mice were divided to four different treatment groups (10 mice/group) and were dosed with PBS (0.2 mL, i.p., q3d; black diamonds, solid black line), istiratumab (30 mpk, i.p., q3d; open squares, dashed line), anti-PD-L1 (atezolizumab/MPDL3280a; 200 μg/mouse per dose, i.p., three times weekly (Monday, Wednesday, Friday); solid triangles, solid black line), or the combination of istiratumab and anti-PD-L1 (open circles, dotted line) as dosed for the monotherapy for the duration of the study. Dosing of istiratumab was initiated on Day 1 post-tumor cell inoculation and dosing of anti-PD-L1 was initiated on Day 4 post-tumor cell inoculation. Tumor volume was measured twice weekly.

### Example 6

[0240] This Example describes a method of treatment of cancer (e.g., colon carcinoma) with a combination of an antibody of FIG. 17 and istiratumab, wherein the therapeutic effect of the combination is larger than the therapeutic effect of an immune checkpoint inhibitor or istiratumab alone when each is administered as monotherapy at the same dose as in the combination.

[0241] FIG. 11A shows that MC38 colorectal cells express IGF-1R and ErbB3. As shown in FIG. 11B, while most of the mice treated with the checkpoint inhibitor anti-PD-L1 had reduced tumor volume over time, including one complete response, mice treated with both istiratumab and anti-PD-L1 showed an even greater overall response, including 3 complete responses.

[0242] For the immunoblotting experiment detailed in FIG. 11A, MC38 cells were plated on 12 well dishes (3×10⁵ cells per well) in 10% serum-containing media and incubated overnight. Once the cell density had reached approximately 70%, cells were harvested in lysis buffer containing protease and phosphatase inhibitors and were analyzed by western blotting.

[0243] For the in vivo study outlined in FIG. 11B, female C57BL/6 mice (10/group) were inoculated subcutaneously with 3×10⁶ MC38 colorectal cancer cells in un-supplemented RPMI 1640 suspension in the left flank. Beginning on Day 4 post-tumor cell inoculation, the mice were dosed for the duration of the study with PBS (0.2 mL. i.p., q3d), istiratumab (30 mpk, i.p., q3d), anti-PD-L1 (atezolizumab/MPDL3280a; 100 μg per dose, i.p., three times weekly (Monday, Wednesday, Friday)), or the combination of istiratumab and anti-PD-L1 as dosed for the monotherapy. Tumor volume was measured twice weekly.

### Example 7

[0244] This Example describes a method of treatment of cancer (e.g., melanoma) with a combination of an antibody of FIG. 17 and istiratumab, wherein the therapeutic effect of the combination is larger than the therapeutic effect of an immune checkpoint inhibitor or istiratumab alone when each is administered as monotherapy at the same dose as in the combination.

[0245] B16-F10 melanoma cells express IGF-1R and ErbB3 (FIG. 12A). As shown in FIG. 12B, while a subset of the mice treated with the checkpoint inhibitor anti-CTLA-4 had reduced tumor volume over time, mice treated with both istiratumab and anti-CTLA-4 showed an even greater overall response. In addition, mice treated with istiratumab and an anti-PD-1 inhibitor had an improved anti-tumor response (FIG. 13).

[0246] For the immunoblotting experiment detailed in FIG. 12A, B16-F10 cells were plated on 12 well dishes (3×10⁵ cells per well) in 10% serum-containing media and incubated overnight. Once the cell density had reached approximately 70%, cells were harvested in lysis buffer containing protease and phosphatase inhibitors and were analyzed by western blotting.

[0247] For the in vivo study outlined in FIG. 12B, female C57BL/6 mice (10/group) were inoculated subcutaneously with 5×10⁵ B16-F10 melanoma cells in un-supplemented DMEM suspension in the left flank. Beginning on Day 4 post-tumor cell inoculation, the mice were dosed with PBS (0.2 mL. i.p., q3d), istiratumab (30 mpk, i.p., q3d), anti-CTLA-4 (clone 9D9, a mouse IgG2b monoclonal antibody, Catalog #: BE0164, BioXCell®; 100 μg per dose, i.p., q3d, on Days 4, 7 and 10 only), or the combination of istiratumab and anti-CTLA-4 as dosed for the monotherapy. Mice were dosed with PBS or istiratumab for the duration of the study. Tumor volume was measured twice weekly.

[0248] For the in vivo study outlined in FIG. 13, female C57BL/6 mice (10/group) were inoculated subcutaneously with 5×10⁵ B16-F10 melanoma cells in un-supplemented DMEM suspension in the left flank. Beginning on Day 4 post-tumor cell inoculation, the mice were dosed with PBS (0.2 mL. i.p., q3d), istiratumab (30 mpk, i.p., q3d), anti-PD-1 (in-house generated mouse IgG2a version of clone J43 hamster antibody; 100 μg per dose, i.p., Days 4, 8, 11, 14 and 18 only), or the combination of istiratumab and anti-PD-1 as dosed for the monotherapy. Mice were dosed with PBS or istiratumab for the duration of the study. Tumor volume was measured twice weekly.

### Example 8

[0249] This Example discloses the results of treatment of plasmacytoid dendritic cells (pDCs; defined as CD123+CD303+) with the ligands insulin-like growth factor ligand (IGF-1) and heregulin (HRG), and istiratumab, wherein the treatment of pDCs with IGF-1 and HRG inhibits the activation of pDCs (as measured by expression of the cell surface activation markers CD83 and CD86 by flow cytometry, and interferon alpha (IFNα) production in the culture medium by ELISA) and PD-L1 expression (measured by flow cytometry) and treatment with istiratumab does not affect pDC activity. Plasmacytoid dendritic cells derived from human whole blood express high levels of IGF-1R and ErbB3, as determined by flow cytometry.

[0250] Plasmacytoid dendritic cells are a subpopulation of innate immune cells that circulate in the blood and are found in peripheral lymphoid organs. They constitute less than 0.4% of peripheral blood mononuclear cells. In humans, these cells express the surface markers CD123 and CD303. Upon stimulation and subsequent activation, these cells produce large amounts of type I interferon (mainly IFN-α (alpha) and IFN-3 (beta)), which are critical pleiotropic anti-viral compounds mediating a wide range of effects. Based on flow cytometry analyses, pDCs express high levels of cell surface IGF-1R and ErbB3 receptors (FIG. 14). Inhibition of pDC activity by ligand treatment (FIG. 15) suggests that blocking these ligands will increase the activity of pDCs and thereby potentially improve the anti-tumor immune response.

[0251] For the experiments outlined in FIG. 14, human whole blood was collected from 3 disease free patients in non-EDTA containing K2 Vacutainers®. The white blood cell fraction was isolated from the whole blood by centrifugation over Ficoll-Paque™ (GE Healthcare: Life Sciences). Various cell immune cell populations were defined by cell surface marker expression as follows (CD4+ T cells, CD4+; Tregs, CD4+CD25+GITR+; CD8+ T cells, CD8+; NK, CD56+CD3-; NKT, CD56+CD3+; monocytes, CD14+; B cells, CD19+; pDCs, CD123+CD303+; mDCs, CD19-CD1c+) and tested for co-expression of IGF-1R and ErbB3 receptor using specific antibodies, as measured by flow cytometry.

[0252] For the quantitative flow cytometry experiments outlined in FIG. 15, human whole blood was collected from disease free patients in non-EDTA containing K2 Vacutainers®. The white blood cell fraction was isolated from the whole blood by centrifugation over Ficoll-Paque™ (GE Healthcare: Life Sciences) and red blood cells lysed by incubation in ACK buffer (Life Technologies) for 2 minutes. Total cell counts were obtained and pDCs were isolated by negative enrichment using the human pDC isolation kit (Miltenyi Biotec) and an AUTOMACS magnetic cell sorter. Isolated pDCs (defined as CD123+CD303+) were >80% pure, based on CD123+CD303+ purity analysis. CD123+CD303+ cells were plated at 20,000 cells per well in a 96 well plate in RPMI media containing 10% fetal bovine serum and betamercaptoethanol (50 μM) in the presence or absence of SD-101 (a Toll-like receptor 9 agonist; 0.5 μM), IGF-1 (50 nM), HRG (10 nM) or istiratumab (300 nM) for 16 hours at 37 degrees Celsius. Changes in percent expression of CD83 and CD86 (markers of pDC activity, represented as mean fluorescence intensity) and interferon α expression in the cell culture media were quantified using flow cytometry and ELISA, respectively.

### Example 9

[0253] This Example discloses the results of treatment of myeloid-derived suppressor cells (MDSCs; defined as Gr1^{dim} Ly6C negative (Ly6C⁻)) with istiratumab, wherein the treatment of MDSCs with istiratumab inhibited the suppressive activity of this cell population on CD4+ T cell proliferation.

[0254] Similar to Tregs, MDSCs are suppressors of immune activation, which can dampen the proliferation of immune cells, including CD4+ T cells. Treatment of mice with istiratumab in vivo dampens the ability of MDSCs isolated from the spleens of these mice to suppress activated CD4+ T cell proliferation in vitro, with 92% inhibition of CD4+ T cell proliferation in the presence of MDSCs from untreated mice compared to 77% inhibition of CD4+ T cell proliferation in the presence of MDSCs from istiratumab-treated mice (FIG. 16).

[0255] As outlined in FIG. 16, two C57bl/6 mice were treated with istiratumab (30 mpk, i.p. q3d×3). Spleens were isolated from istiratumab-treated mice for MDSC isolation and two untreated C57bl/6 mice for CD4+ T cell isolation. MDSCs and CD4+ T cells were isolated using the MDSC isolation kit (Miltenyi Biotec) and CD4+ T cell isolation kit (Miltenyi Biotec), respectively, and an AUTOMACS magnetic cell sorter. MDSCs were stained with CFSE and CD4+ T cells were stained with Far Red Cell tracker (Thermo Fisher), then 50,000 CD4+ T cells were plated together with 25,000 MDSCs, where applicable, at 1:0, 1:0.5 and 0:1 CD4+:MDSCs for 3 days in the presence or absence of CD3/CD28 beads (activators of CD4+ T cells). CD4+ T cell proliferation was measured by evaluating Far Red Cell Tracker dilution in the APC channel by flow cytometry. Unactivated CD4+ T cells did not proliferate (as evidenced by the single right-most peak), whereas activated CD4+ T cells did proliferate, as evidenced by the leftward shift (i.e. decrease) in Far Red Cell Tracker signal.

### ENDNOTES

[0256] While the invention has been described in connection with specific embodiments thereof, it will be understood that it is capable of further modifications and this application is intended to cover any variations, uses, or adaptations of the invention following, in general, the principles of the invention and including such departures from the present disclosure that come within known or customary practice within the art to which the invention pertains and may be applied to the essential features set forth herein. The disclosure of each and every U.S., international, or other patent or patent application or publication referred to herein is hereby incorporated herein by reference in its entirety.

ADDITIONAL SEQUENCES

| SEQ ID | | |
|---|---|---|
| NO: | DESIGNATION | SEQUENCE |
| 438 | MPDL3280A_HC_ | EVQLVESGGGLVQPGGSLRLSCAASGFTFSDSWIHWVRQAPGKGL |
| | hIgG1_ | EWVAWISPYGGSTYYADSVKGRFTISADTSKNTAYLQMNSLRAED |
| | D265A/N297A | TAVYYCARRHWPGGFDYWGQGTLVTVSAASTKGPSVFPLAPSSKS |
| | | TSGGTAALGCLVKDYFPEPVTVSWNSGALTSGVHTFPAVLQSSGL |
| | | YSLSSVVTVPSSSLGTQTYICNVNHKPSNTKVDKKVEPKSCDKTH |
| | | TCPPCPAPELLGGPSVFLFPPKPKDTLMISRTPEVTCVVVAVSHE |
| | | DPEVKFNWYVDGVEVHNAKTKPREEQYASTYRVVSVLTVLHQDWL |
| | | NGKEYKCKVSNKALPAPIEKTISKAKGQPREPQVYTLPPSRDELT |
| | | KNQVSLTCLVKGFYPSDIAVEWESNGQPENNYKTTPPVLDSDGSF |
| | | FLYSKLTVDKSRWQQGNVFSCSVMHEALHNHYTQKSLSLSPG |
| 439 | MPDL3280A_HC_ | EVQLVESGGGLVQPGGSLRLSCAASGFTFSDSWIHWVRQAPGKGL |
| | chimerized_ | EWVAWISPYGGSTYYADSVKGRFTISADTSKNTAYLQMNSLRAED |
| | mIgG2A_ | TAVYYCARRHWPGGFDYWGQGTLVTVSAAKTTAPSVYPLAPVCGD |
| | D265A/N297A | TTGSSVTLGCLVKGYFPEPVTLTWNSGSLSSGVHTFPAVLQSDLY |
| | | TLSSSVTVTSSTWPSQSITCNVAHPASSTKVDKKIEPRGPTIKPC |
| | | PPCKCPAPNLLGGPSVFIFPPKIKDVLMISLSPIVTCVVVAVSED |
| | | DPDVQISWFVNNVEVHTAQTQTHREDYASTLRVVSALPIQHQDWM |
| | | SGKEFKCKVNNKDLPAPIERTISKPKGSVRAPQVYVLPPPEEEMT |
| | | KKQVTLTCMVTDFMPEDIYVEWTNNGKTELNYKNTEPVLDSDGSY |
| | | FMYSKLRVEKKNWVERNSYSCSVVHEGLHNHHTTKSFSRTPG |
| 440 | MPDL3280A_LC | DIQMTQSPSSLSASVGDRVTITCRASQDVSTAVAWYQQKPGKAPK |
| | | LLIYSASFLYSGVPSRFSGSGSGTDFTLTISSLQPEDFATYYCQQ |
| | | YLYHPATFGQGTKVEIKRTVAAPSVFIFPPSDEQLKSGTASVVCL |
| | | LNNFYPREAKVQWKVDNALQSGNSQESVTEQDSKDSTYSLSSTLT |
| | | LSKADYEKHKVYACEVTHQGLSSPVTKSFNRGEC |
| 441 | MPDL3280A_LC_ | DIQMTQSPSSLSASVGDRVTITCRASQDVSTAVAWYQQKPGKAPK |
| | chv2 | LLIYSASFLYSGVPSRFSGSGSGTDFTLTISSLQPEDFATYYCQQ |
| | | YLYHPATFGAGTKLELKRADAAPTVSIFPPSSEQLTSGGASVVCF |
| | | LNNFYPKDINVKWKIDGSERQNGVLNSWTDQDSKDSTYSMSSTLT |
| | | LTKDEYERHNSYTCEATHKTSTSPIVKSFNRNEC |
| 442 | 141mIgG2aHC | EVQLLQSGGGLVQPGGSLRLSCAASGFMFSRYPMHWVRQAPGKGL |
| | | EWVGSISGSGGATPYADSVKGRFTISRDNSKNTLYLQMNSLRAED |
| | | TAVYYCAKDFYQILTGNAFDYWGQGTTVTVSSAKTTAPSVYPLAP |
| | | VCGDTTGSSVTLGCLVKGYFPEPVTLTWNSGSLSSGVHTFPAVLQ |
| | | SDLYTLSSSVTVTSSTWPSQSITCNVAHPASSTKVDKKIEPRGPT |
| | | IKPCPPCKCPAPNLLGGPSVFIFPPKIKDVLMISLSPIVTCVVVD |
| | | VSEDDPDVQISWFVNNVEVHTAQTQTHREDYNSTLRVVSALPIQH |
| | | QDWMSGKEFKCKVNNKDLPAPIERTISKPKGSVRAPQVYVLPPPE |
| | | EEMTKKQVTLTCMVTDFMPEDIYVEWTNNGKTELNYKNTEPVLDS |
| | | DGSYFMYSKLRVEKKNWVERNSYSCSVVHEGLHNHHTTKSFSRTP |
| | | GGGGGSGGGGSGGGGSQVQLVQSGGGLVQPGGSLRLSCAASGFTF |
| | | DDYAMHWVRQAPGKGLEWVAGISWDSGSTGYADSVKGRFTISRDN |
| | | AKNSLYLQMNSLRAEDTALYYCARDLGAYQWVEGFDYWGQGTLVT |
| | | VSSASTGGGGSGGGGSGGGGSGGGGSSYELTQDPAVSVALGQTVR |
| | | ITCQGDSLRSYYASWYQQKPGQAPVLVIYGKNNRPSGIPDRFSGS |
| | | TSGNSASLTITGAQAEDEADYYCNSRDSPGNQWVFGGGTKVTVLG |
| 443 | 141mLC | DIQMTQSPSSLSASLGDRVTITCRASQGISSYLAWYQQKPGKAPK |
| | | LLIYAKSTLQSGVPSRFSGSGSGTDFTLTISSLQPEDSATYYCQQ |
| | | YWTFPLTFGGGTKVEIKRADAAPTVSIFPPSSEQLTSGGASVVCF |
| | | LNNFYPKDINVKWKIDGSERQNGVLNSWTDQDSKDSTYSMSSTLT |
| | | LTKDEYERHNSYTCEATHKTSTSPIVKSFNRNEC |
| 444 | ErbB3 protein | Ser Glu Val Gly Asn Ser Gln Ala Val Cys |
| | (corresponding to | Pro Gly Thr Leu Asn Gly Leu Ser Val Thr |
| | SEQ ID NO: 4 | Gly Asp Ala Glu Asn Gln Tyr Gln Thr Leu |
| | from U.S. Pat. | Tyr Lys Leu Tyr Glu Arg Cys Glu Val Val |
| | No. 5,480,968) | Met Gly Asn Leu Glu Ile Val Leu Thr Gly |
| | | His Asn Ala Asp Leu Ser Phe Leu Gln Trp |
| | | Ile Arg Glu Val Thr Gly Tyr Val Leu Val |
| | | Ala Met Asn Glu Phe Ser Thr Leu Pro Leu |
| | | Pro Asn Leu Arg Val Val Arg Gly Thr Gln |
| | | Val Tyr Asp Gly Lys Phe Ala Ile Phe Val |
| | | Met Leu Asn Tyr Asn Thr Asn Ser Ser His |
| | | Ala Leu Arg Gln Leu Arg Leu Thr Gln Leu |
| | | Thr Glu Ile Leu Ser Gly Gly Val Tyr Ile |
| | | Glu Lys Asn Asp Lys Leu Cys His Met Asp |
| | | Thr Ile Asp Trp Arg Asp Ile Val Arg Asp |
| | | Arg Asp Ala Glu Ile Val Val Lys Asp Asn |
| | | Gly Arg Ser Cys Pro Pro Cys His Glu Val |
| | | Cys Lys Gly Arg Cys Trp Gly Pro Gly Ser |
| | | Glu Asp Cys Gln Thr Leu Thr Lys Thr Ile |
| | | Cys Ala Pro Gln Cys Asn Gly His Cys Phe |
| | | Gly Pro Asn Pro Asn Gln Cys Cys His Asp |
| | | Glu Cys Ala Gly Gly Cys Ser Gly Pro Gln |
| | | Asp Thr Asp Cys Phe Ala Cys Arg His Phe |
| | | Asn Asp Ser Gly Ala Cys Val Pro Arg Cys |
| | | Pro Gln Pro Leu Val Tyr Asn Lys Leu Thr |
| | | Phe Gln Leu Glu Pro Asn Pro His Thr Lys |
| | | Tyr Gln Tyr Gly Gly Val Cys Val Ala Ser |
| | | Cys Pro His Asn Phe Val Val Asp Gln Thr |
| | | Ser Cys Val Arg Ala Cys Pro Pro Asp Lys |
| | | Met Glu Val Asp Lys Asn Gly Leu Lys Met |
| | | Cys Glu Pro Cys Gly Gly Leu Cys Pro Lys |
| | | Ala Cys Glu Gly Thr Gly Ser Gly Ser Arg |
| | | Phe Gln Thr Val Asp Ser Ser Asn Ile Asp |
| | | Gly Phe Val Asn Cys Thr Lys Ile Leu Gly |
| | | Asn Leu Asp Phe Leu Ile Thr Gln Gly Asp |
| | | Pro Trp His Lys Ile Pro Ala Leu Asp Pro |
| | | Glu Lys Leu Asn Val Phe Arg Thr Val Arg |
| | | Glu Ile Thr Gly Tyr Leu Asn Ile Gln Ser |
| | | Trp Pro Pro His Met His Asn Phe Ser Val |
| | | Phe Ser Asn Leu Thr Thr Ile Gly Gly Arg |
| | | Ser Leu Tyr Asn Arg Gly Phe Ser Leu Leu |
| | | Ile Met Lys Asn Leu Asn Val Thr Ser Leu |
| | | Gly Phe Arg Ser Leu Lys Glu Ile Ser Ala |
| | | Gly Arg Ile Tyr Ile Ser Ala Asn Arg Gln |
| | | Leu Cys Tyr His His Ser Leu Asn Trp Thr |
| | | Lys Val Leu Arg Gly Pro Thr Glu Glu Arg |
| | | Leu Asp Ile Lys His Asn Arg Pro Arg Arg |
| | | Asp Cys Val Ala Glu Gly Lys Val Cys Asp |
| | | Pro Leu Cys Ser Ser Gly Gly Cys Trp Gly |
| | | Pro Gly Pro Gly Gln Cys Leu Ser Cys Arg |
| | | Asn Tyr Ser Arg Gly Gly Val Cys Val Thr |
| | | His Cys Asn Phe Leu Asn Gly Glu Pro Arg |
| | | Glu Phe Ala His Glu Ala Glu Cys Phe Ser |
| | | Cys His Pro Glu Cys Gln Pro Met Glu Gly |
| | | Thr Ala Thr Cys Asn Gly Ser Gly Ser Asp |
| | | Thr Cys Ala Gln Cys Ala His Phe Arg Asp |
| | | Gly Pro His Cys Val Ser Ser Cys Pro His |
| | | Gly Val Leu Gly Ala Lys Gly Pro Ile Tyr |
| | | Lys Tyr Pro Asp Val Gln Asn Glu Cys Arg |
| | | Pro Cys His Glu Asn Cys Thr Gln Gly Cys |
| | | Lys Gly Pro Glu Leu Gln Asp Cys Leu Gly |
| | | Gln Thr Leu Val Leu Ile Gly Lys Thr His |
| | | Leu Thr Met Ala Leu Thr Val Ile Ala Gly |
| | | Leu Val Val Ile Phe Met Met Leu Gly Gly |
| | | Thr Phe Leu Tyr Trp Arg Gly Arg Arg Ile |
| | | Gln Asn Lys Arg Ala Met Arg Arg Tyr Leu |
| | | Glu Arg Gly Glu Ser Ile Glu Pro Leu Asp |
| | | Pro Ser Glu Lys Ala Asn Lys Val Leu Ala |
| | | Arg Ile Phe Lys Glu Thr Glu Leu Arg Ser |
| | | Leu Lys Val Leu Gly Ser Gly Val Phe Gly |
| | | Thr Val His Lys Gly Val Trp Ile Pro Glu |
| | | Gly Glu Ser Ile Lys Ile Pro Val Cys Ile |
| | | Lys Val Ile Glu Asp Lys Ser Gly Arg Gln |
| | | Ser Phe Gln Ala Val Thr Asp His Met Leu |
| | | Ala Ile Gly Ser Leu Asp His Ala His Ile |
| | | Val Arg Leu Leu Gly Leu Cys Pro Gly Ser |
| | | Ser Leu Gln Leu Val Thr Gln Tyr Leu Pro |
| | | Leu Gly Ser Leu Leu Asp His Val Arg Gln |
| | | His Arg Gly Ala Leu Gly Pro Gln Leu Leu |
| | | Leu Asn Trp Gly Val Gln Ile Ala Lys Gly |
| | | Met Tyr Tyr Leu Glu Glu His Gly Met Val |
| | | His Arg Asn Leu Ala Ala Arg Asn Val Leu |
| | | Leu Lys Ser Pro Ser Gln Val Gln Val Ala |
| | | Asp Phe Gly Val Ala Asp Leu Leu Pro Pro |
| | | Asp Asp Lys Gln Leu Leu Tyr Ser Glu Ala |
| | | Lys Thr Pro Ile Lys Trp Met Ala Leu Glu |
| | | Ser Ile His Phe Gly Lys Tyr Thr His Gln |
| | | Ser Asp Val Trp Ser Tyr Gly Val Thr Val |
| | | Trp Glu Leu Met Thr Phe Gly Ala Glu Pro |
| | | Tyr Ala Gly Leu Arg Leu Ala Glu Val Pro |
| | | Asp Leu Leu Glu Lys Gly Glu Arg Leu Ala |
| | | Gln Pro Gln Ile Cys Thr Ile Asp Val Tyr |
| | | Met Val Met Val Lys Cys Trp Met Ile Asp |
| | | Glu Asn Ile Arg Pro Thr Phe Lys Glu Leu |
| | | Ala Asn Glu Phe Thr Arg Met Ala Arg Asp |
| | | Pro Pro Arg Tyr Leu Val Ile Lys Arg Glu |
| | | Ser Gly Pro Gly Ile Ala Pro Gly Pro Glu |
| | | Pro His Gly Leu Thr Asn Lys Lys Leu Glu |
| | | Glu Val Glu Leu Glu Pro Glu Leu Asp Leu |
| | | Asp Leu Asp Leu Glu Ala Glu Glu Asp Asn |
| | | Leu Ala Thr Thr Thr Leu Gly Ser Ala Leu |
| | | Ser Leu Pro Val Gly Thr Leu Asn Arg Pro |
| | | Arg Gly Ser Gln Ser Leu Leu Ser Pro Ser |
| | | Ser Gly Tyr Met Pro Met Asn Gln Gly Asn |
| | | Leu Gly Glu Ser Cys Gln Glu Ser Ala Val |
| | | Ser Gly Ser Ser Glu Arg Cys Pro Arg Pro |
| | | Val Ser Leu His Pro Met Pro Arg Gly Cys |
| | | Leu Ala Ser Glu Ser Ser Glu Gly His Val |
| | | Thr Gly Ser Glu Ala Glu Leu Gln Glu Lys |
| | | Val Ser Met Cys Arg Ser Arg Ser Arg Ser |
| | | Arg Ser Pro Arg Pro Arg Gly Asp Ser Ala |
| | | Tyr His Ser Gln Arg His Ser Leu Leu Thr |
| | | Pro Val Thr Pro Leu Ser Pro Pro Gly Leu |
| | | Glu Glu Glu Asp Val Asn Gly Tyr Val Met |
| | | Pro Asp Thr His Leu Lys Gly Thr Pro Ser |
| | | Ser Arg Glu Gly Thr Leu Ser Ser Val Gly |
| | | Leu Ser Ser Val Leu Gly Thr Glu Glu Glu |
| | | Asp Glu Asp Glu Glu Tyr Glu Tyr Met Asn |
| | | Arg Arg Arg Arg His Ser Pro Pro His Pro |
| | | Pro Arg Pro Ser Ser Leu Glu Glu Leu Gly |
| | | Tyr Glu Tyr Met Asp Val Gly Ser Asp Leu |
| | | Ser Ala Ser Leu Gly Ser Thr Gln Ser Cys |
| | | Pro Leu His Pro Val Pro Ile Met Pro Thr |
| | | Ala Gly Thr Thr Pro Asp Glu Asp Tyr Glu |
| | | Tyr Met Asn Arg Gln Arg Asp Gly Gly Gly |
| | | Pro Gly Gly Asp Tyr Ala Ala Met Gly Ala |
| | | Cys Pro Ala Ser Glu Gln Gly Tyr Glu Glu |
| | | Met Arg Ala Phe Gln Gly Pro Gly His Gin |
| | | Ala Pro His Val His Tyr Ala Arg Leu Lys |
| | | Thr Leu Arg Ser Leu Glu Ala Thr Asp Ser |
| | | Ala Phe Asp Asn Pro Asp Tyr Trp His Ser |
| | | Arg Leu Phe Pro Lys Ala Asn Ala Gln Arg |
| | | Thr |

The application's sequence listing, which the Patent Office published only in electronic form, follows.

SEQUENCE LISTING (444 sequences)

SEQ ID NO: 1 - protein, 122 aa, Artificial Sequence
  Description of Artificial Sequence: Synthetic consensus sequence
  misc_feature: see specification as filed for detailed description of substitutions and preferred embodiments
  MOD_RES (28)..(28): Phe, Asp, Asn, Thr, Leu, Val, Met, Glu, Arg, Ser, Ala, Trp or Pro
  MOD_RES (31)..(31): Lys, Ser, Arg, Val, His, Glu, Ile, Asn, Asp, Ala or Thr
  MOD_RES (49)..(49): Ser or Gly
  MOD_RES (53)..(53): Ser, Gly, Ala or Pro
  MOD_RES (54)..(54): Asp, Ser, Trp, Gly or Leu
  MOD_RES (59)..(59): Val, Pro, Arg, Ile or Ala
  MOD_RES (88)..(88): Ala or Pro
  MOD_RES (102)..(102): Thr, Gln, Asp, Tyr, Asn, Arg, Trp, Phe, His, Met or Lys
  MOD_RES (103)..(103): Trp, Ile, Met or Leu
  MOD_RES (111)..(111): Ser, Met, Tyr, Ile, Lys, Glu, Val, Ala, Arg, Thr or Asn
  MOD_RES (117)..(117): Ser or Thr
EVQLLQSGGGLVQPGGSLRLSCAASGFXFSXYPMHWVRQAPGKGLEWVXSISXXGGATXYADSVKGRFTISRDNSKNTLYLQMNSLRXEDTAVYYCAKDFYXXLTGNAFDXWGQGTXVTVSS

SEQ ID NO: 2 - protein, 107 aa, Artificial Sequence
  Description of Artificial Sequence: Synthetic consensus sequence
  misc_feature: see specification as filed for detailed description of substitutions and preferred embodiments
  MOD_RES (4)..(4): Leu or Met
  MOD_RES (15)..(15): Leu or Thr
  MOD_RES (51)..(51): Arg, Ser, Lys, Ala, Gly, Gln, Thr, Asn, Pro or Asp
  MOD_RES (54)..(54): Arg, Leu, Cys, Thr, Pro, Gly, Ser, Lys, Glu, Gln, His Ala, Tyr, Ile
  MOD_RES (70)..(70): Glu or Asp
  MOD_RES (83)..(83): Ser or Phe
  MOD_RES (84)..(84): Ala or Gly
  MOD_RES (92)..(92): Trp or Phe
  MOD_RES (93)..(93): Thr, Ala, Arg, Met, Phe, Ser, Asn, Trp, Gln, Leu or Val
  MOD_RES (94)..(94): Trp or Phe
DIQXTQSPSSLSASXGDRVTITCRASQGISSYLAWYQQKPGKAPKLLIYAXSTXQSGVPSRFSGSGSGTXFTLTISSLQPEDXXTYYCQQYXXXPLTFGGGTKVEIK

SEQ ID NO: 3 - protein, 107 aa, Artificial Sequence
  Description of Artificial Sequence: Synthetic consensus sequence
  misc_feature: see specification as filed for detailed description of substitutions and preferred embodiments
  MOD_RES (4)..(4): Leu or Met
  MOD_RES (51)..(51): Arg, Ser, Lys, Ala, Gly, Gln, Thr, Asn, Pro or Asp
  MOD_RES (54)..(54): Arg, Leu, Cys, Thr, Pro, Gly, Ser, Lys, Glu, Gln, His Ala, Tyr, Ile
  MOD_RES (70)..(70): Glu or Asp
  MOD_RES (84)..(84): Ala or gly
  MOD_RES (93)..(93): Thr, Ala, Arg, Met, Phe, Ser, Asn, Trp, Gln, Leu or Val
  MOD_RES (94)..(94): Trp or Phe
DIQXTQSPSSLSASLGDRVTITCRASQGISSYLAWYQQKPGKAPKLLIYAXSTXQSGVPSRFSGSGSGTXFTLTISSLQPEDSXTYYCQQYWXXPLTFGGGTKVEIK

SEQ ID NO: 4 - protein, 122 aa, Artificial Sequence
  Description of Artificial Sequence: Synthetic consensus sequence
  misc_feature: see specification as filed for detailed description of substitutions and preferred embodiments
  MOD_RES (1)..(1): Glu or Gln
  MOD_RES (6)..(6): Glu or Gln
  MOD_RES (16)..(16): Arg or Gly
  MOD_RES (49)..(49): Ser or Ala
  MOD_RES (54)..(54): Asp or Asn
  MOD_RES (58)..(58): Val, Arg, Thr, Ile, Met, Ser, Asn or Leu
  MOD_RES (88)..(88): Ala or Pro
  MOD_RES (93)..(93): Leu or Val
  MOD_RES (102)..(102): Ala, Phe or Tyr
  MOD_RES (103)..(103): Tyr, Asn, Lys, Phe, Met or Ser
  MOD_RES (106)..(106): Glu, Val, Trp, Leu, Gln or Asn
  MOD_RES (107)..(107): Glu or Asp
XVQLVXSGGGLVQPGXSLRLSCAASGFTFDDYAMHWVRQAPGKGLEWVXGISWXSGSXGYADSVKGRFTISRDNAKNSLYLQMNSLRXEDTAXYYCARDLGXXQWXXGFDYWGQGTLVTVSS

SEQ ID NO: 5 - protein, 122 aa, Artificial Sequence
  Description of Artificial Sequence: Synthetic consensus sequence
  misc_feature: see specification as filed for detailed description of substitutions and preferred embodiments
  MOD_RES (1)..(1): Glu or Gln
  MOD_RES (6)..(6): Glu or Gln
  MOD_RES (16)..(16): Arg or Gly
  MOD_RES (49)..(49): Ser or Ala
  MOD_RES (54)..(54): Asp or Asn
  MOD_RES (58)..(58): Val, Arg, Thr, Ile, Met, Ser, Asn or Leu
  MOD_RES (102)..(102): Ala, Phe or Tyr
  MOD_RES (103)..(103): Tyr, Asn, Lys, Phe, Met or Ser
  MOD_RES (106)..(106): Glu, Val, Trp, Leu, Gln or Asn
  MOD_RES (107)..(107): Glu or Asp
XVQLVXSGGGLVQPGXSLRLSCAASGFTFDDYAMHWVRQAPGKGLEWVXGISWXSGSXGYADSVKGRFTISRDNAKNSLYLQMNSLRAEDTALYYCARDLGXXQWXXGFDYWGQGTLVTVSS

SEQ ID NO: 6 - protein, 109 aa, Artificial Sequence
  Description of Artificial Sequence: Synthetic consensus sequence
  misc_feature: see specification as filed for detailed description of substitutions and preferred embodiments
  MOD_RES (2)..(2): Ser or Tyr
  MOD_RES (65)..(65): Ser or Thr
  MOD_RES (69)..(69): Ser or Thr
  MOD_RES (88)..(88): Asn, Glu or Met
  MOD_RES (92)..(92): Trp, Val, Thr, Ser, His, Tyr, Asn or Ala
  MOD_RES (93)..(93): Ser or Pro
  MOD_RES (95)..(95): Asn or Asp
  MOD_RES (96)..(96): Gln, Lys, His, Ser, Val, Arg, Thr or Asn
  MOD_RES (108)..(108): Leu or Ile
SXELTQDPAVSVALGQTVRITCQGDSLRSYYASWYQQKPGQAPVLVIYGKNNRPSGIPDRFSGSXSGNXASLTITGAQAEDEADYYCXSRDXXGXXWVFGGGTKVTVXG

SEQ ID NO: 7 - protein, 109 aa, Artificial Sequence
  Description of Artificial Sequence: Synthetic consensus sequence
  misc_feature: see specification as filed for detailed description of substitutions and preferred embodiments
  MOD_RES (2)..(2): Ser or Tyr
  MOD_RES (65)..(65): Ser or Thr
  MOD_RES (69)..(69): Ser or Thr
  MOD_RES (88)..(88): Asn, Glu or Met
  MOD_RES (92)..(92): Trp, Val, Thr, Ser, His, Tyr, Asn or Ala
  MOD_RES (95)..(95): Asn or Asp
  MOD_RES (96)..(96): Gln, Lys, His, Ser, Val, Arg, Thr or Asn
  MOD_RES (108)..(108): Leu or Ile
SXELTQDPAVSVALGQTVRITCQGDSLRSYYASWYQQKPGQAPVLVIYGKNNRPSGIPDRFSGSXSGNXASLTITGAQAEDEADYYCXSRDXPGXXWVFGGGTKVTVXG

SEQ ID NO: 8 - protein, 122 aa, Artificial Sequence
  Description of Artificial Sequence: Synthetic polypeptide
EVQLLQSGGGLVQPGGSLRLSCAASGFFFSKYPMHWVRQAPGKGLEWVSSISSDGGATVYADSVKGRFTISRDNSKNTLYLQMNSLRAEDTAVYYCAKDFYTWLTGNAFDSWGQGTSVTVSS

SEQ ID NO: 9 - protein, 122 aa, Artificial Sequence
  Description of Artificial Sequence: Synthetic polypeptide
EVQLLQSGGGLVQPGGSLRLSCAASGFDFSSYPMHWVRQAPGKGLEWVGSISSSGGATPYADSVKGRFTISRDNSKNTLYLQMNSLRPEDTAVYYCAKDFYTILTGNAFDMWGQGTSVTVSS

SEQ ID NO: 10 - protein, 122 aa, Artificial Sequence
  Description of Artificial Sequence: Synthetic polypeptide
EVQLLQSGGGLVQPGGSLRLSCAASGFMFSRYPMHWVRQAPGKGLEWVGSISGSGGATPYADSVKGRFTISRDNSKNTLYLQMNSLRAEDTAVYYCAKDFYQILTGNAFDYWGQGTTVTVSS

SEQ ID NO: 11 - protein, 122 aa, Artificial Sequence
  Description of Artificial Sequence: Synthetic polypeptide
EVQLLQSGGGLVQPGGSLRLSCAASGFTFSVYPMHWVRQAPGKGLEWVSSISSSGGATRYADSVKGRFTISRDNSKNTLYLQMNSLRAEDTAVYYCAKDFYDILTGNAFDIWGQGTTVTVSS

SEQ ID NO: 12 - protein, 122 aa, Artificial Sequence
  Description of Artificial Sequence: Synthetic polypeptide
EVQLLQSGGGLVQPGGSLRLSCAASGFDFSHYPMHWVRQAPGKGLEWVSSISSSGGATIYADSVKGRFTISRDNSKNTLYLQMNSLRPEDTAVYYCAKDFYDMLTGNAFDKWGQGTSVTVSS

SEQ ID NO: 13 - protein, 122 aa, Artificial Sequence
  Description of Artificial Sequence: Synthetic polypeptide
EVQLLQSGGGLVQPGGSLRLSCAASGFLFSRYPMHWVRQAPGKGLEWVSSISSSGGATPYADSVKGRFTISRDNSKNTLYLQMNSLRPEDTAVYYCAKDFYTMLTGNAFDEWGQGTTVTVSS

SEQ ID NO: 14 - protein, 122 aa, Artificial Sequence
  Description of Artificial Sequence: Synthetic polypeptide
EVQLLQSGGGLVQPGGSLRLSCAASGFDFSHYPMHWVRQAPGKGLEWVSSISSSGGATIYADSVKGRFTISRDNSKNTLYLQMNSLRAEDTAVYYCAKDFYYMLTGNAFDVWGQGTTVTVSS

SEQ ID NO: 15 - protein, 122 aa, Artificial Sequence
  Description of Artificial Sequence: Synthetic polypeptide
EVQLLQSGGGLVQPGGSLRLSCAASGFVFSSYPMHWVRQAPGKGLEWVGSISSWGGATPYADSVKGRFTISRDNSKNTLYLQMNSLRPEDTAVYYCAKDFYTLLTGNAFDMWGQGTTVTVSS

SEQ ID NO: 16 - protein, 122 aa, Artificial Sequence; identical to SEQ ID NO: 10
  Description of Artificial Sequence: Synthetic polypeptide

SEQ ID NO: 17 - protein, 122 aa, Artificial Sequence
  Description of Artificial Sequence: Synthetic polypeptide
EVQLLQSGGGLVQPGGSLRLSCAASGFEFSEYPMHWVRQAPGKGLEWVGSISSGGGATPYADSVKGRFTISRDNSKNTLYLQMNSLRAEDTAVYYCAKDFYNILTGNAFDAWGQGTTVTVSS

SEQ ID NO: 18 - protein, 122 aa, Artificial Sequence
  Description of Artificial Sequence: Synthetic polypeptide
EVQLLQSGGGLVQPGGSLRLSCAASGFRFSIYPMHWVRQAPGKGLEWVSSISSSGGATAYADSVKGRFTISRDNSKNTLYLQMNSLRAEDTAVYYCAKDFYRMLTGNAFDRWGQGTSVTVSS

SEQ ID NO: 19 - protein, 122 aa, Artificial Sequence
  Description of Artificial Sequence: Synthetic polypeptide
EVQLLQSGGGLVQPGGSLRLSCAASGFSFSNYPMHWVRQAPGKGLEWVGSISGSGGATPYADSVKGRFTISRDNSKNTLYLQMNSLRAEDTAVYYCAKDFYWMLTGNAFDTWGQGTTVTVSS

SEQ ID NO: 20 - protein, 122 aa, Artificial Sequence
  Description of Artificial Sequence: Synthetic polypeptide
EVQLLQSGGGLVQPGGSLRLSCAASGFAFSSYPMHWVRQAPGKGLEWVGSISASGGATPYADSVKGRFTISRDNSKNTLYLQMNSLRAEDTAVYYCAKDFYQILTGNAFDYWGQGTSVTVSS

SEQ ID NO: 21 - protein, 122 aa, Artificial Sequence; identical to SEQ ID NO: 8
  Description of Artificial Sequence: Synthetic polypeptide

SEQ ID NO: 22 - protein, 122 aa, Artificial Sequence
  Description of Artificial Sequence: Synthetic polypeptide
EVQLLQSGGGLVQPGGSLRLSCAASGFAFSRYPMHWVRQAPGKGLEWVGSISGWGGATPYADSVKGRFTISRDNSKNTLYLQMNSLRPEDTAVYYCAKDFYFMLTGNAFDEWGQGTSVTVSS

SEQ ID NO: 23 - protein, 122 aa, Artificial Sequence
  Description of Artificial Sequence: Synthetic polypeptide
EVQLLQSGGGLVQPGGSLRLSCAASGFLFSSYPMHWVRQAPGKGLEWVGSISSLGGATPYADSVKGRFTISRDNSKNTLYLQMNSLRAEDTAVYYCAKDFYTWLTGNAFDMWGQGTSVTVSS

SEQ ID NO: 24 - protein, 122 aa, Artificial Sequence
  Description of Artificial Sequence: Synthetic polypeptide
EVQLLQSGGGLVQPGGSLRLSCAASGFAFSSYPMHWVRQAPGKGLEWVGSISGSGGATPYADSVKGRFTISRDNSKNTLYLQMNSLRPEDTAVYYCAKDFYHILTGNAFDNWGQGTTVTVSS

SEQ ID NO: 25 - protein, 122 aa, Artificial Sequence
  Description of Artificial Sequence: Synthetic polypeptide
EVQLLQSGGGLVQPGGSLRLSCAASGFWFSDYPMHWVRQAPGKGLEWVGSISSSGGATPYADSVKGRFTISRDNSKNTLYLQMNSLRPEDTAVYYCAKDFYNILTGNAFDRWGQGTSVTVSS

SEQ ID NO: 26 - protein, 122 aa, Artificial Sequence; identical to SEQ ID NO: 9
  Description of Artificial Sequence: Synthetic polypeptide

SEQ ID NO: 27 - protein, 122 aa, Artificial Sequence
  Description of Artificial Sequence: Synthetic polypeptide
EVQLLQSGGGLVQPGGSLRLSCAASGFDFSHYPMHWVRQAPGKGLEWVSSISSSGGATIYADSVKGRFTISRDNSKNTLYLQMNSLRAEDTAVYYCAKDFYMILTGNAFDTWGQGTTVTVSS

SEQ ID NO: 28 - protein, 122 aa, Artificial Sequence
  Description of Artificial Sequence: Synthetic polypeptide
EVQLLQSGGGLVQPGGSLRLSCAASGFPFSAYPMHWVRQAPGKGLEWVSSISASGGATPYADSVKGRFTISRDNSKNTLYLQMNSLRAEDTAVYYCAKDFYKILTGNAFDMWGQGTSVTVSS

SEQ ID NO: 29 - protein, 122 aa, Artificial Sequence
  Description of Artificial Sequence: Synthetic polypeptide
EVQLLQSGGGLVQPGGSLRLSCAASGFPFSTYPMHWVRQAPGKGLEWVGSISSSGGATPYADSVKGRFTISRDNSKNTLYLQMNSLRAEDTAVYYCAKDFYWMLTGNAFDVWGQGTSVTVSS

SEQ ID NO: 30 - protein, 122 aa, Artificial Sequence
  Description of Artificial Sequence: Synthetic polypeptide
EVQLLQSGGGLVQPGGSLRLSCAASGFDFSHYPMHWVRQAPGKGLEWVSSISSSGGATIYADSVKGRFTISRDNSKNTLYLQMNSLRPEDTAVYYCAKDFYWMLTGNAFDKWGQGTTVTVSS

SEQ ID NO: 31 - protein, 122 aa, Artificial Sequence
  Description of Artificial Sequence: Synthetic polypeptide
EVQLLQSGGGLVQPGGSLRLSCAASGFLFSSYPMHWVRQAPGKGLEWVGSISPSGGATPYADSVKGRFTISRDNSKNTLYLQMNSLRPEDTAVYYCAKDFYNILTGNAFDKWGQGTSVTVSS

SEQ ID NO: 32 - protein, 107 aa, Artificial Sequence
  Description of Artificial Sequence: Synthetic polypeptide
DIQLTQSPSSLSASLGDRVTITCRASQGISSYLAWYQQKPGKAPKLLIYARSTRQSGVPSRFSGSGSGTEFTLTISSLQPEDSATYYCQQYWTWPLTFGGGTKVEIK

SEQ ID NO: 33 - protein, 107 aa, Artificial Sequence
  Description of Artificial Sequence: Synthetic polypeptide
DIQMTQSPSSLSASLGDRVTITCRASQGISSYLAWYQQKPGKAPKLLIYASSTRQSGVPSRFSGSGSGTDFTLTISSLQPEDSGTYYCQQYWAFPLTFGGGTKVEIK

SEQ ID NO: 34 - protein, 107 aa, Artificial Sequence
  Description of Artificial Sequence: Synthetic polypeptide
DIQMTQSPSSLSASLGDRVTITCRASQGISSYLAWYQQKPGKAPKLLIYAKSTLQSGVPSRFSGSGSGTDFTLTISSLQPEDSATYYCQQYWTFPLTFGGGTKVEIK

SEQ ID NO: 35 - protein, 107 aa, Artificial Sequence
  Description of Artificial Sequence: Synthetic polypeptide
DIQMTQSPSSLSASTGDRVTITCRASQGISSYLAWYQQKPGKAPKLLIYAASTLQSGVPSRFSGSGSGTDFTLTISSLQPEDFATYYCQQYFTFPLTFGGGTKVEIK

SEQ ID NO: 36 - protein, 107 aa, Artificial Sequence
  Description of Artificial Sequence: Synthetic polypeptide
DIQLTQSPSSLSASLGDRVTITCRASQGISSYLAWYQQKPGKAPKLLIYAGSTCQSGVPSRFSGSGSGTDFTLTISSLQPEDSGTYYCQQYWTWPLTFGGGTKVEIK

SEQ ID NO: 37 - protein, 107 aa, Artificial Sequence
  Description of Artificial Sequence: Synthetic polypeptide
DIQMTQSPSSLSASLGDRVTITCRASQGISSYLAWYQQKPGKAPKLLIYAKSTRQSGVPSRFSGSGSGTDFTLTISSLQPEDSGTYYCQQYWRWPLTFGGGTKVEIK

SEQ ID NO: 38 - protein, 107 aa, Artificial Sequence
  Description of Artificial Sequence: Synthetic polypeptide
DIQLTQSPSSLSASLGDRVTITCRASQGISSYLAWYQQKPGKAPKLLIYAASTRQSGVPSRFSGSGSGTEFTLTISSLQPEDSATYYCQQYWMWPLTFGGGTKVEIK

SEQ ID NO: 39 - protein, 107 aa, Artificial Sequence
  Description of Artificial Sequence: Synthetic polypeptide
DIQMTQSPSSLSASLGDRVTITCRASQGISSYLAWYQQKPGKAPKLLIYASSTTQSGVPSRFSGSGSGTEFTLTISSLQPEDSATYYCQQYWTFPLTFGGGTKVEIK

SEQ ID NO: 40 - protein, 107 aa, Artificial Sequence
  Description of Artificial Sequence: Synthetic polypeptide
DIQMTQSPSSLSASLGDRVTITCRASQGISSYLAWYQQKPGKAPKLLIYAGSTPQSGVPSRFSGSGSGTEFTLTISSLQPEDSGTYYCQQYWFFPLTFGGGTKVEIK

SEQ ID NO: 41 - protein, 107 aa, Artificial Sequence
  Description of Artificial Sequence: Synthetic polypeptide
DIQLTQSPSSLSASLGDRVTITCRASQGISSYLAWYQQKPGKAPKLLIYAKSTRQSGVPSRFSGSGSGTDFTLTISSLQPEDSGTYYCQQYWMFPLTFGGGTKVEIK

SEQ ID NO: 42 - protein, 107 aa, Artificial Sequence
  Description of Artificial Sequence: Synthetic polypeptide
DIQLTQSPSSLSASLGDRVTITCRASQGISSYLAWYQQKPGKAPKLLIYAGSTGQSGVPSRFSGSGSGTDFTLTISSLQPEDSATYYCQQYWRFPLTFGGGTKVEIK

SEQ ID NO: 43 - protein, 107 aa, Artificial Sequence
  Description of Artificial Sequence: Synthetic polypeptide
DIQMTQSPSSLSASLGDRVTITCRASQGISSYLAWYQQKPGKAPKLLIYASSTPQSGVPSRFSGSGSGTEFTLTISSLQPEDSGTYYCQQYWSFPLTFGGGTKVEIK

SEQ ID NO: 44 - protein, 107 aa, Artificial Sequence
  Description of Artificial Sequence: Synthetic polypeptide
DIQLTQSPSSLSASLGDRVTITCRASQGISSYLAWYQQKPGKAPKLLIYAASTPQSGVPSRFSGSGSGTDFTLTISSLQPEDSGTYYCQQYWTWPLTFGGGTKVEIK

SEQ ID NO: 45 - protein, 107 aa, Artificial Sequence; identical to SEQ ID NO: 44
  Description of Artificial Sequence: Synthetic polypeptide

SEQ ID NO: 46 - protein, 107 aa, Artificial Sequence; identical to SEQ ID NO: 44
  Description of Artificial Sequence: Synthetic polypeptide

SEQ ID NO: 47 - protein, 107 aa, Artificial Sequence; identical to SEQ ID NO: 43
  Description of Artificial Sequence: Synthetic polypeptide

SEQ ID NO: 48 - protein, 107 aa, Artificial Sequence; identical to SEQ ID NO: 39
  Description of Artificial Sequence: Synthetic polypeptide

SEQ ID NO: 49 - protein, 107 aa, Artificial Sequence; identical to SEQ ID NO: 39
  Description of Artificial Sequence: Synthetic polypeptide

SEQ ID NO: 50 - protein, 107 aa, Artificial Sequence
  Description of Artificial Sequence: Synthetic polypeptide
DIQLTQSPSSLSASLGDRVTITCRASQGISSYLAWYQQKPGKAPKLLIYASSTLQSGVPSRFSGSGSGTEFTLTISSLQPEDSATYYCQQYWMFPLTFGGGTKVEIK

SEQ ID NO: 51 - protein, 107 aa, Artificial Sequence; identical to SEQ ID NO: 50
  Description of Artificial Sequence: Synthetic polypeptide

SEQ ID NO: 52 - protein, 107 aa, Artificial Sequence
  Description of Artificial Sequence: Synthetic polypeptide
DIQMTQSPSSLSASLGDRVTITCRASQGISSYLAWYQQKPGKAPKLLIYASSTPQSGVPSRFSGSGSGTEFTLTISSLQPEDSATYYCQQYWNFPLTFGGGTKVEIK

SEQ ID NO: 53 - protein, 107 aa, Artificial Sequence; identical to SEQ ID NO: 52
  Description of Artificial Sequence: Synthetic polypeptide

SEQ ID NO: 54 - protein, 107 aa, Artificial Sequence; identical to SEQ ID NO: 52
  Description of Artificial Sequence: Synthetic polypeptide

SEQ ID NO: 55 - protein, 107 aa, Artificial Sequence; identical to SEQ ID NO: 52
  Description of Artificial Sequence: Synthetic polypeptide

SEQ ID NO: 56 - protein, 107 aa, Artificial Sequence; identical to SEQ ID NO: 52
  Description of Artificial Sequence: Synthetic polypeptide

SEQ ID NO: 57 - protein, 107 aa, Artificial Sequence; identical to SEQ ID NO: 52
  Description of Artificial Sequence: Synthetic polypeptide

SEQ ID NO: 58 - protein, 107 aa, Artificial Sequence; identical to SEQ ID NO: 52
  Description of Artificial Sequence: Synthetic polypeptide

SEQ ID NO: 59 - protein, 107 aa, Artificial Sequence; identical to SEQ ID NO: 52
  Description of Artificial Sequence: Synthetic polypeptide

SEQ ID NO: 60 - protein, 107 aa, Artificial Sequence; identical to SEQ ID NO: 52
  Description of Artificial Sequence: Synthetic polypeptide

SEQ ID NO: 61 - protein, 107 aa, Artificial Sequence; identical to SEQ ID NO: 52
  Description of Artificial Sequence: Synthetic polypeptide

SEQ ID NO: 62 - protein, 107 aa, Artificial Sequence; identical to SEQ ID NO: 52
  Description of Artificial Sequence: Synthetic polypeptide

SEQ ID NO: 63 - protein, 107 aa, Artificial Sequence; identical to SEQ ID NO: 52
  Description of Artificial Sequence: Synthetic polypeptide

SEQ ID NO: 64 - protein, 107 aa, Artificial Sequence; identical to SEQ ID NO: 52
  Description of Artificial Sequence: Synthetic polypeptide

SEQ ID NO: 65 - protein, 107 aa, Artificial Sequence; identical to SEQ ID NO: 52
  Description of Artificial Sequence: Synthetic polypeptide

SEQ ID NO: 66 - protein, 107 aa, Artificial Sequence
  Description of Artificial Sequence: Synthetic polypeptide
DIQMTQSPSSLSASLGDRVTITCRASQGISSYLAWYQQKPGKAPKLLIYAASTTQSGVPSRFSGSGSGTDFTLTISSLQPEDSGTYYCQQYWTFPLTFGGGTKVEIK

SEQ ID NO: 67 - protein, 107 aa, Artificial Sequence; identical to SEQ ID NO: 66
  Description of Artificial Sequence: Synthetic polypeptide

SEQ ID NO: 68 - protein, 107 aa, Artificial Sequence; identical to SEQ ID NO: 44
  Description of Artificial Sequence: Synthetic polypeptide

SEQ ID NO: 69 - protein, 107 aa, Artificial Sequence; identical to SEQ ID NO: 39
  Description of Artificial Sequence: Synthetic polypeptide

SEQ ID NO: 70 - protein, 107 aa, Artificial Sequence; identical to SEQ ID NO: 39
  Description of Artificial Sequence: Synthetic polypeptide

SEQ ID NO: 71 - protein, 107 aa, Artificial Sequence; identical to SEQ ID NO: 44
  Description of Artificial Sequence: Synthetic polypeptide

SEQ ID NO: 72 - protein, 107 aa, Artificial Sequence; identical to SEQ ID NO: 44
  Description of Artificial Sequence: Synthetic polypeptide

SEQ ID NO: 73 - protein, 107 aa, Artificial Sequence; identical to SEQ ID NO: 32
  Description of Artificial Sequence: Synthetic polypeptide

SEQ ID NO: 74 - protein, 107 aa, Artificial Sequence; identical to SEQ ID NO: 39
  Description of Artificial Sequence: Synthetic polypeptide

SEQ ID NO: 75 - protein, 107 aa, Artificial Sequence; identical to SEQ ID NO: 39
  Description of Artificial Sequence: Synthetic polypeptide

SEQ ID NO: 76 - protein, 107 aa, Artificial Sequence; identical to SEQ ID NO: 44
  Description of Artificial Sequence: Synthetic polypeptide

SEQ ID NO: 77 - protein, 107 aa, Artificial Sequence
  Description of Artificial Sequence: Synthetic polypeptide
DIQMTQSPSSLSASLGDRVTITCRASQGISSYLAWYQQKPGKAPKLLIYASSTSQSGVPSRFSGSGSGTDFTLTISSLQPEDSGTYYCQQYWWWPLTFGGGTKVEIK

SEQ ID NO: 78 - protein, 107 aa, Artificial Sequence; identical to SEQ ID NO: 39
  Description of Artificial Sequence: Synthetic polypeptide

SEQ ID NO: 79 - protein, 107 aa, Artificial Sequence; identical to SEQ ID NO: 44
  Description of Artificial Sequence: Synthetic polypeptide

SEQ ID NO: 80 - protein, 107 aa, Artificial Sequence; identical to SEQ ID NO: 43
  Description of Artificial Sequence: Synthetic polypeptide

SEQ ID NO: 81 - protein, 107 aa, Artificial Sequence; identical to SEQ ID NO: 34
  Description of Artificial Sequence: Synthetic polypeptide

SEQ ID NO: 82 - protein, 107 aa, Artificial Sequence
  Description of Artificial Sequence: Synthetic polypeptide
DIQLTQSPSSLSASLGDRVTITCRASQGISSYLAWYQQKPGKAPKLLIYASSTPQSGVPSRFSGSGSGTEFTLTISSLQPEDSATYYCQQYWWWPLTFGGGTKVEIK

SEQ ID NO: 83 - protein, 107 aa, Artificial Sequence; identical to SEQ ID NO: 77
  Description of Artificial Sequence: Synthetic polypeptide

SEQ ID NO: 84 - protein, 107 aa, Artificial Sequence; identical to SEQ ID NO: 77
  Description of Artificial Sequence: Synthetic polypeptide

SEQ ID NO: 85 - protein, 107 aa, Artificial Sequence
  Description of Artificial Sequence: Synthetic polypeptide
DIQMTQSPSSLSASLGDRVTITCRASQGISSYLAWYQQKPGKAPKLLIYARSTLQSGVPSRFSGSGSGTEFTLTISSLQPEDSATYYCQQYWMFPLTFGGGTKVEIK

SEQ ID NO: 86 - protein, 107 aa, Artificial Sequence; identical to SEQ ID NO: 77
  Description of Artificial Sequence: Synthetic polypeptide

SEQ ID NO: 87 - protein, 107 aa, Artificial Sequence
  Description of Artificial Sequence: Synthetic polypeptide
DIQMTQSPSSLSASLGDRVTITCRASQGISSYLAWYQQKPGKAPKLLIYAQSTKQSGVPSRFSGSGSGTEFTLTISSLQPEDSGTYYCQQYWTWPLTFGGGTKVEIK

SEQ ID NO: 88 - protein, 107 aa, Artificial Sequence
  Description of Artificial Sequence: Synthetic polypeptide
DIQLTQSPSSLSASLGDRVTITCRASQGISSYLAWYQQKPGKAPKLLIYASSTEQSGVPSRFSGSGSGTEFTLTISSLQPEDSGTYYCQQYWSFPLTFGGGTKVEIK

SEQ ID NO: 89 - protein, 107 aa, Artificial Sequence
  Description of Artificial Sequence: Synthetic polypeptide
DIQLTQSPSSLSASLGDRVTITCRASQGISSYLAWYQQKPGKAPKLLIYARSTRQSGVPSRFSGSGSGTEFTLTISSLQPEDSATYYCQQYWRWPLTFGGGTKVEIK

SEQ ID NO: 90 - protein, 107 aa, Artificial Sequence; identical to SEQ ID NO: 34
  Description of Artificial Sequence: Synthetic polypeptide

SEQ ID NO: 91 - protein, 107 aa, Artificial Sequence
  Description of Artificial Sequence: Synthetic polypeptide
DIQLTQSPSSLSASLGDRVTITCRASQGISSYLAWYQQKPGKAPKLLIYAASTQQSGVPSRFSGSGSGTEFTLTISSLQPEDSGTYYCQQYWSWPLTFGGGTKVEIK

SEQ ID NO: 92 - protein, 107 aa, Artificial Sequence
  Description of Artificial Sequence: Synthetic polypeptide
DIQLTQSPSSLSASLGDRVTITCRASQGISSYLAWYQQKPGKAPKLLIYASSTPQSGVPSRFSGSGSGTDFTLTISSLQPEDSATYYCQQYWRFPLTFGGGTKVEIK

SEQ ID NO: 93 - protein, 107 aa, Artificial Sequence
  Description of Artificial Sequence: Synthetic polypeptide
DIQMTQSPSSLSASLGDRVTITCRASQGISSYLAWYQQKPGKAPKLLIYARSTLQSGVPSRFSGSGSGTEFTLTISSLQPEDSATYYCQQYWTFPLTFGGGTKVEIK

SEQ ID NO: 94 - protein, 107 aa, Artificial Sequence
  Description of Artificial Sequence: Synthetic polypeptide
DIQLTQSPSSLSASLGDRVTITCRASQGISSYLAWYQQKPGKAPKLLIYAGSTSQSGVPSRFSGSGSGTEFTLTISSLQPEDSGTYYCQQYWTWPLTFGGGTKVEIK

SEQ ID NO: 95 - protein, 107 aa, Artificial Sequence
  Description of Artificial Sequence: Synthetic polypeptide
DIQMTQSPSSLSASLGDRVTITCRASQGISSYLAWYQQKPGKAPKLLIYARSTLQSGVPSRFSGSGSGTDFTLTISSLQPEDSATYYCQQYWSWPLTFGGGTKVEIK

SEQ ID NO: 96 - protein, 107 aa, Artificial Sequence
  Description of Artificial Sequence: Synthetic polypeptide
DIQLTQSPSSLSASLGDRVTITCRASQGISSYLAWYQQKPGKAPKLLIYATSTLQSGVPSRFSGSGSGTEFTLTISSLQPEDSGTYYCQQYWRFPLTFGGGTKVEIK

SEQ ID NO: 97 - protein, 107 aa, Artificial Sequence
  Description of Artificial Sequence: Synthetic polypeptide
DIQLTQSPSSLSASLGDRVTITCRASQGISSYLAWYQQKPGKAPKLLIYARSTRQSGVPSRFSGSGSGTEFTLTISSLQPEDSATYYCQQYWTFPLTFGGGTKVEIK

SEQ ID NO: 98 - protein, 107 aa, Artificial Sequence; identical to SEQ ID NO: 93
  Description of Artificial Sequence: Synthetic polypeptide

SEQ ID NO: 99 - protein, 107 aa, Artificial Sequence
  Description of Artificial Sequence: Synthetic polypeptide
DIQMTQSPSSLSASLGDRVTITCRASQGISSYLAWYQQKPGKAPKLLIYASSTHQSGVPSRFSGSGSGTDFTLTISSLQPEDSATYYCQQYWRWPLTFGGGTKVEIK

SEQ ID NO: 100 - protein, 107 aa, Artificial Sequence; identical to SEQ ID NO: 82
  Description of Artificial Sequence: Synthetic polypeptide

SEQ ID NO: 101 - protein, 107 aa, Artificial Sequence
  Description of Artificial Sequence: Synthetic polypeptide
DIQLTQSPSSLSASLGDRVTITCRASQGISSYLAWYQQKPGKAPKLLIYAASTRQSGVPSRFSGSGSGTDFTLTISSLQPEDSATYYCQQYWTFPLTFGGGTKVEIK

SEQ ID NO: 102 - protein, 107 aa, Artificial Sequence
  Description of Artificial Sequence: Synthetic polypeptide
DIQMTQSPSSLSASLGDRVTITCRASQGISSYLAWYQQKPGKAPKLLIYANSTAQSGVPSRFSGSGSGTEFTLTISSLQPEDSATYYCQQYWRWPLTFGGGTKVEIK

SEQ ID NO: 103 - protein, 107 aa, Artificial Sequence; identical to SEQ ID NO: 42
  Description of Artificial Sequence: Synthetic polypeptide

SEQ ID NO: 104 - protein, 107 aa, Artificial Sequence
  Description of Artificial Sequence: Synthetic polypeptide
DIQMTQSPSSLSASLGDRVTITCRASQGISSYLAWYQQKPGKAPKLLIYAASTTQSGVPSRFSGSGSGTDFTLTISSLQPEDSATYYCQQYWTFPLTFGGGTKVEIK

SEQ ID NO: 105 - protein, 107 aa, Artificial Sequence; identical to SEQ ID NO: 37
  Description of Artificial Sequence: Synthetic polypeptide

SEQ ID NO: 106 - protein, 107 aa, Artificial Sequence
  Description of Artificial Sequence: Synthetic polypeptide
DIQMTQSPSSLSASLGDRVTITCRASQGISSYLAWYQQKPGKAPKLLIYAQSTLQSGVPSRFSGSGSGTDFTLTISSLQPEDSGTYYCQQYWRFPLTFGGGTKVEIK

SEQ ID NO: 107 - protein, 107 aa, Artificial Sequence
  Description of Artificial Sequence: Synthetic polypeptide
DIQMTQSPSSLSASLGDRVTITCRASQGISSYLAWYQQKPGKAPKLLIYATSTAQSGVPSRFSGSGSGTDFTLTISSLQPEDSGTYYCQQYWMFPLTFGGGTKVEIK

SEQ ID NO: 108 - protein, 107 aa, Artificial Sequence
  Description of Artificial Sequence: Synthetic polypeptide
DIQLTQSPSSLSASLGDRVTITCRASQGISSYLAWYQQKPGKAPKLLIYARSTTQSGVPSRFSGSGSGTEFTLTISSLQPEDSGTYYCQQYWSFPLTFGGGTKVEIK

SEQ ID NO: 109 - protein, 107 aa, Artificial Sequence
  Description of Artificial Sequence: Synthetic polypeptide
DIQLTQSPSSLSASLGDRVTITCRASQGISSYLAWYQQKPGKAPKLLIYAPSTPQSGVPSRFSGSGSGTEFTLTISSLQPEDSATYYCQQYWMFPLTFGGGTKVEIK

SEQ ID NO: 110 - protein, 107 aa, Artificial Sequence; identical to SEQ ID NO: 43
  Description of Artificial Sequence: Synthetic polypeptide

SEQ ID NO: 111 - protein, 107 aa, Artificial Sequence
  Description of Artificial Sequence: Synthetic polypeptide
DIQLTQSPSSLSASLGDRVTITCRASQGISSYLAWYQQKPGKAPKLLIYARSTLQSGVPSRFSGSGSGTEFTLTISSLQPEDSGTYYCQQYWTWPLTFGGGTKVEIK

SEQ ID NO: 112 - protein, 107 aa, Artificial Sequence
  Description of Artificial Sequence: Synthetic polypeptide
DIQMTQSPSSLSASLGDRVTITCRASQGISSYLAWYQQKPGKAPKLLIYAASTRQSGVPSRFSGSGSGTDFTLTISSLQPEDSGTYYCQQYWSFPLTFGGGTKVEIK

SEQ ID NO: 113 - protein, 107 aa, Artificial Sequence
  Description of Artificial Sequence: Synthetic polypeptide
DIQMTQSPSSLSASLGDRVTITCRASQGISSYLAWYQQKPGKAPKLLIYAASTPQSGVPSRFSGSGSGTEFTLTISSLQPEDSATYYCQQYWRFPLTFGGGTKVEIK

SEQ ID NO: 114 - protein, 107 aa, Artificial Sequence
  Description of Artificial Sequence: Synthetic polypeptide
DIQLTQSPSSLSASLGDRVTITCRASQGISSYLAWYQQKPGKAPKLLIYAGSTTQSGVPSRFSGSGSGTDFTLTISSLQPEDSGTYYCQQYWRWPLTFGGGTKVEIK

SEQ ID NO: 115 - protein, 107 aa, Artificial Sequence
  Description of Artificial Sequence: Synthetic polypeptide
DIQLTQSPSSLSASLGDRVTITCRASQGISSYLAWYQQKPGKAPKLLIYASSTSQSGVPSRFSGSGSGTDFTLTISSLQPEDSATYYCQQYWQFPLTFGGGTKVEIK

SEQ ID NO: 116 - protein, 107 aa, Artificial Sequence; identical to SEQ ID NO: 32
  Description of Artificial Sequence: Synthetic polypeptide

SEQ ID NO: 117 - protein, 107 aa, Artificial Sequence; identical to SEQ ID NO: 43
  Description of Artificial Sequence: Synthetic polypeptide

SEQ ID NO: 118 - protein, 107 aa, Artificial Sequence
  Description of Artificial Sequence: Synthetic polypeptide
DIQMTQSPSSLSASLGDRVTITCRASQGISSYLAWYQQKPGKAPKLLIYATSTAQSGVPSRFSGSGSGTDFTLTISSLQPEDSATYYCQQYWFWPLTFGGGTKVEIK

SEQ ID NO: 119 - protein, 107 aa, Artificial Sequence
  Description of Artificial Sequence: Synthetic polypeptide
DIQLTQSPSSLSASLGDRVTITCRASQGISSYLAWYQQKPGKAPKLLIYASSTRQSGVPSRFSGSGSGTEFTLTISSLQPEDSATYYCQQYWLFPLTFGGGTKVEIK

SEQ ID NO: 120 - protein, 107 aa, Artificial Sequence
  Description of Artificial Sequence: Synthetic polypeptide
DIQLTQSPSSLSASLGDRVTITCRASQGISSYLAWYQQKPGKAPKLLIYASSTRQSGVPSRFSGSGSGTEFTLTISSLQPEDSGTYYCQQYWWFPLTFGGGTKVEIK

SEQ ID NO: 121 - protein, 107 aa, Artificial Sequence; identical to SEQ ID NO: 109
  Description of Artificial Sequence: Synthetic polypeptide

SEQ ID NO: 122 - protein, 107 aa, Artificial Sequence
  Description of Artificial Sequence: Synthetic polypeptide
DIQMTQSPSSLSASLGDRVTITCRASQGISSYLAWYQQKPGKAPKLLIYARSTYQSGVPSRFSGSGSGTEFTLTISSLQPEDSGTYYCQQYWRWPLTFGGGTKVEIK

SEQ ID NO: 123 - protein, 107 aa, Artificial Sequence
  Description of Artificial Sequence: Synthetic polypeptide
DIQMTQSPSSLSASLGDRVTITCRASQGISSYLAWYQQKPGKAPKLLIYARSTIQSGVPSRFSGSGSGTEFTLTISSLQPEDSATYYCQQYWTFPLTFGGGTKVEIK

SEQ ID NO: 124 - protein, 107 aa, Artificial Sequence
  Description of Artificial Sequence: Synthetic polypeptide
DIQMTQSPSSLSASLGDRVTITCRASQGISSYLAWYQQKPGKAPKLLIYARSTPQSGVPSRFSGSGSGTEFTLTISSLQPEDSATYYCQQYWLFPLTFGGGTKVEIK

SEQ ID NO: 125 - protein, 107 aa, Artificial Sequence
  Description of Artificial Sequence: Synthetic polypeptide
DIQMTQSPSSLSASLGDRVTITCRASQGISSYLAWYQQKPGKAPKLLIYAASTLQSGVPSRFSGSGSGTDFTLTISSLQPEDSGTYYCQQYWFFPLTFGGGTKVEIK

SEQ ID NO: 126 - protein, 107 aa, Artificial Sequence; identical to SEQ ID NO: 33
  Description of Artificial Sequence: Synthetic polypeptide

SEQ ID NO: 127 - protein, 107 aa, Artificial Sequence
  Description of Artificial Sequence: Synthetic polypeptide
DIQMTQSPSSLSASLGDRVTITCRASQGISSYLAWYQQKPGKAPKLLIYASSTHQSGVPSRFSGSGSGTEFTLTISSLQPEDSGTYYCQQYWTFPLTFGGGTKVEIK

SEQ ID NO: 128 - protein, 107 aa, Artificial Sequence
  Description of Artificial Sequence: Synthetic polypeptide
DIQLTQSPSSLSASLGDRVTITCRASQGISSYLAWYQQKPGKAPKLLIYASSTRQSGVPSRFSGSGSGTEFTLTISSLQPEDSATYYCQQYWVWPLTFGGGTKVEIK

SEQ ID NO: 129 - protein, 107 aa, Artificial Sequence
  Description of Artificial Sequence: Synthetic polypeptide
DIQLTQSPSSLSASLGDRVTITCRASQGISSYLAWYQQKPGKAPKLLIYAGSTRQSGVPSRFSGSGSGTDFTLTISSLQPEDSATYYCQQYWTWPLTFGGGTKVEIK

SEQ ID NO: 130 - protein, 107 aa, Artificial Sequence
  Description of Artificial Sequence: Synthetic polypeptide
DIQLTQSPSSLSASLGDRVTITCRASQGISSYLAWYQQKPGKAPKLLIYAASTRQSGVPSRFSGSGSGTEFTLTISSLQPEDSGTYYCQQYWTWPLTFGGGTKVEIK

SEQ ID NO: 131 - protein, 107 aa, Artificial Sequence
  Description of Artificial Sequence: Synthetic polypeptide
DIQLTQSPSSLSASLGDRVTITCRASQGISSYLAWYQQKPGKAPKLLIYARSTLQSGVPSRFSGSGSGTEFTLTISSLQPEDSGTYYCQQYWTFPLTFGGGTKVEIK

SEQ ID NO: 132 - protein, 107 aa, Artificial Sequence
  Description of Artificial Sequence: Synthetic polypeptide
DIQMTQSPSSLSASLGDRVTITCRASQGISSYLAWYQQKPGKAPKLLIYADSTSQSGVPSRFSGSGSGTEFTLTISSLQPEDSATYYCQQYWTFPLTFGGGTKVEIK

SEQ ID NO: 133 - protein, 107 aa, Artificial Sequence
  Description of Artificial Sequence: Synthetic polypeptide
DIQLTQSPSSLSASLGDRVTITCRASQGISSYLAWYQQKPGKAPKLLIYAGSTPQSGVPSRFSGSGSGTEFTLTISSLQPEDSGTYYCQQYWTWPLTFGGGTKVEIK

SEQ ID NO: 134 - protein, 122 aa, Artificial Sequence
  Description of Artificial Sequence: Synthetic polypeptide
EVQLVESGGGLVQPGRSLRLSCAASGFTFDDYAMHWVRQAPGKGLEWVSGISWDSGSVGYADSVKGRFTISRDNAKNSLYLQMNSLRAEDTALYYCARDLGAYQWEEGFDYWGQGTLVTVSS

SEQ ID NO: 135 - protein, 122 aa, Artificial Sequence
  Description of Artificial Sequence: Synthetic polypeptide
EVQLVESGGGLVQPGRSLRLSCAASGFTFDDYAMHWVRQAPGKGLEWVSGISWNSGSRGYADSVKGRFTISRDNAKNSLYLQMNSLRAEDTALYYCARDLGFNQWEEGFDYWGQGTLVTVSS

SEQ ID NO: 136 - protein, 122 aa, Artificial Sequence
  Description of Artificial Sequence: Synthetic polypeptide
EVQLVESGGGLVQPGRSLRLSCAASGFTFDDYAMHWVRQAPGKGLEWVSGISWNSGSTGYADSVKGRFTISRDNAKNSLYLQMNSLRAEDTALYYCARDLGFNQWVDGFDYWGQGTLVTVSS

SEQ ID NO: 137 - protein, 122 aa, Artificial Sequence
  Description of Artificial Sequence: Synthetic polypeptide
EVQLVESGGGLVQPGRSLRLSCAASGFTFDDYAMHWVRQAPGKGLEWVSGISWDSGSVGYADSVKGRFTISRDNAKNSLYLQMNSLRAEDTALYYCARDLGYNQWWEGFDYWGQGTLVTVSS

SEQ ID NO: 138 - protein, 122 aa, Artificial Sequence
  Description of Artificial Sequence: Synthetic polypeptide
EVQLVESGGGLVQPGRSLRLSCAASGFTFDDYAMHWVRQAPGKGLEWVSGISWDSGSTGYADSVKGRFTISRDNAKNSLYLQMNSLRAEDTALYYCARDLGAYQWVEGFDYWGQGTLVTVSS

SEQ ID NO: 139 - protein, 122 aa, Artificial Sequence; identical to SEQ ID NO: 136
  Description of Artificial Sequence: Synthetic polypeptide

SEQ ID NO: 140 - protein, 122 aa, Artificial Sequence
  Description of Artificial Sequence: Synthetic polypeptide
EVQLVESGGGLVQPGRSLRLSCAASGFTFDDYAMHWVRQAPGKGLEWVSGISWNSGSVGYADSVKGRFTISRDNAKNSLYLQMNSLRAEDTALYYCARDLGYNQWLEGFDYWGQGTLVTVSS

SEQ ID NO: 141 - protein, 122 aa, Artificial Sequence
  Description of Artificial Sequence: Synthetic polypeptide
EVQLVESGGGLVQPGRSLRLSCAASGFTFDDYAMHWVRQAPGKGLEWVSGISWNSGSTGYADSVKGRFTISRDNAKNSLYLQMNSLRAEDTALYYCARDLGYNQWLEGFDYWGQGTLVTVSS

SEQ ID NO: 142 - protein, 122 aa, Artificial Sequence
  Description of Artificial Sequence: Synthetic polypeptide
QVQLVQSGGGLVQPGGSLRLSCAASGFTFDDYAMHWVRQAPGKGLEWVAGISWDSGSTGYADSVKGRFTISRDNAKNSLYLQMNSLRAEDTALYYCARDLGAYQWVEGFDYWGQGTLVTVSS

SEQ ID NO: 143 - protein, 122 aa, Artificial Sequence
  Description of Artificial Sequence: Synthetic polypeptide
QVQLVQSGGGLVQPGGSLRLSCAASGFTFDDYAMHWVRQAPGKGLEWVAGISWNSGSIGYADSVKGRFTISRDNAKNSLYLQMNSLRPEDTAVYYCARDLGYNQWVEGFDYWGQGTLVTVSS

SEQ ID NO: 144 - protein, 122 aa, Artificial Sequence
  Description of Artificial Sequence: Synthetic polypeptide
EVQLVESGGGLVQPGRSLRLSCAASGFTFDDYAMHWVRQAPGKGLEWVSGISWNSGSIGYADSVKGRFTISRDNAKNSLYLQMNSLRAEDTALYYCARDLGAKQWLEGFDYWGQGTLVTVSS

SEQ ID NO: 145 - protein, 122 aa, Artificial Sequence
  Description of Artificial Sequence: Synthetic polypeptide
EVQLVESGGGLVQPGRSLRLSCAASGFTFDDYAMHWVRQAPGKGLEWVSGISWNSGSMGYADSVKGRFTISRDNAKNSLYLQMNSLRAEDTALYYCARDLGAFQWEEGFDYWGQGTLVTVSS

SEQ ID NO: 146 - protein, 122 aa, Artificial Sequence
  Description of Artificial Sequence: Synthetic polypeptide
EVQLVESGGGLVQPGRSLRLSCAASGFTFDDYAMHWVRQAPGKGLEWVSGISWDSGSSGYADSVKGRFTISRDNAKNSLYLQMNSLRAEDTALYYCARDLGAFQWQEGFDYWGQGTLVTVSS

SEQ ID NO: 147 - protein, 122 aa, Artificial Sequence
  Description of Artificial Sequence: Synthetic polypeptide
EVQLVESGGGLVQPGRSLRLSCAASGFTFDDYAMHWVRQAPGKGLEWVSGISWNSGSTGYADSVKGRFTISRDNAKNSLYLQMNSLRAEDTALYYCARDLGAMQWVEGFDYWGQGTLVTVSS

SEQ ID NO: 148 - protein, 122 aa, Artificial Sequence
  Description of Artificial Sequence: Synthetic polypeptide
EVQLVESGGGLVQPGRSLRLSCAASGFTFDDYAMHWVRQAPGKGLEWVSGISWNSGSIGYADSVKGRFTISRDNAKNSLYLQMNSLRAEDTALYYCARDLGFNQWNEGFDYWGQGTLVTVSS

SEQ ID NO: 149 - protein, 122 aa, Artificial Sequence; identical to SEQ ID NO: 148
  Description of Artificial Sequence: Synthetic polypeptide

SEQ ID NO: 150 - protein, 122 aa, Artificial Sequence; identical to SEQ ID NO: 148
  Description of Artificial Sequence: Synthetic polypeptide

SEQ ID NO: 151 - protein, 122 aa, Artificial Sequence
  Description of Artificial Sequence: Synthetic polypeptide
EVQLVESGGGLVQPGRSLRLSCAASGFTFDDYAMHWVRQAPGKGLEWVSGISWNSGSIGYADSVKGRFTISRDNAKNSLYLQMNSLRAEDTALYYCARDLGFNQWLEGFDYWGQGTLVTVSS

SEQ ID NO: 152 - protein, 122 aa, Artificial Sequence
  Description of Artificial Sequence: Synthetic polypeptide
EVQLVESGGGLVQPGRSLRLSCAASGFTFDDYAMHWVRQAPGKGLEWVSGISWDSGSNGYADSVKGRFTISRDNAKNSLYLQMNSLRAEDTALYYCARDLGFMQWVDGFDYWGQGTLVTVSS

SEQ ID NO: 153 - protein, 122 aa, Artificial Sequence
  Description of Artificial Sequence: Synthetic polypeptide
EVQLVESGGGLVQPGRSLRLSCAASGFTFDDYAMHWVRQAPGKGLEWVSGISWNSGSVGYADSVKGRFTISRDNAKNSLYLQMNSLRAEDTALYYCARDLGYNQWVEGFDYWGQGTLVTVSS

SEQ ID NO: 154 - protein, 122 aa, Artificial Sequence; identical to SEQ ID NO: 141
  Description of Artificial Sequence: Synthetic polypeptide

SEQ ID NO: 155 - protein, 122 aa, Artificial Sequence
  Description of Artificial Sequence: Synthetic polypeptide
EVQLVESGGGLVQPGRSLRLSCAASGFTFDDYAMHWVRQAPGKGLEWVSGISWNSGSVGYADSVKGRFTISRDNAKNSLYLQMNSLRAEDTALYYCARDLGYNQWLDGFDYWGQGTLVTVSS

SEQ ID NO: 156 - protein, 122 aa, Artificial Sequence; identical to SEQ ID NO: 141
  Description of Artificial Sequence: Synthetic polypeptide

SEQ ID NO: 157 - protein, 122 aa, Artificial Sequence
  Description of Artificial Sequence: Synthetic polypeptide
EVQLVESGGGLVQPGRSLRLSCAASGFTFDDYAMHWVRQAPGKGLEWVSGISWNSGSSGYADSVKGRFTISRDNAKNSLYLQMNSLRAEDTALYYCARDLGYNQWLEGFDYWGQGTLVTVSS

SEQ ID NO: 158 - protein, 122 aa, Artificial Sequence
  Description of Artificial Sequence: Synthetic polypeptide
EVQLVESGGGLVQPGRSLRLSCAASGFTFDDYAMHWVRQAPGKGLEWVSGISWNSGSMGYADSVKGRFTISRDNAKNSLYLQMNSLRAEDTALYYCARDLGYNQWLEGFDYWGQGTLVTVSS

SEQ ID NO: 159 - protein, 122 aa, Artificial Sequence
  Description of Artificial Sequence: Synthetic polypeptide
EVQLVESGGGLVQPGRSLRLSCAASGFTFDDYAMHWVRQAPGKGLEWVSGISWDSGSRGYADSVKGRFTISRDNAKNSLYLQMNSLRAEDTALYYCARDLGYNQWLEGFDYWGQGTLVTVSS

SEQ ID NO: 160 - protein, 122 aa, Artificial Sequence
  Description of Artificial Sequence: Synthetic polypeptide
EVQLVESGGGLVQPGRSLRLSCAASGFTFDDYAMHWVRQAPGKGLEWVSGISWDSGSTGYADSVKGRFTISRDNAKNSLYLQMNSLRAEDTALYYCARDLGYNQWQEGFDYWGQGTLVTVSS

SEQ ID NO: 161 - protein, 122 aa, Artificial Sequence; identical to SEQ ID NO: 137
  Description of Artificial Sequence: Synthetic polypeptide

SEQ ID NO: 162 - protein, 122 aa, Artificial Sequence
  Description of Artificial Sequence: Synthetic polypeptide
EVQLVESGGGLVQPGRSLRLSCAASGFTFDDYAMHWVRQAPGKGLEWVSGISWDSGSLGYADSVKGRFTISRDNAKNSLYLQMNSLRAEDTALYYCARDLGYSQWVEGFDYWGQGTLVTVSS

SEQ ID NO: 163 - protein, 122 aa, Artificial Sequence; identical to SEQ ID NO: 134
  Description of Artificial Sequence: Synthetic polypeptide

SEQ ID NO: 164 - protein, 122 aa, Artificial Sequence
  Description of Artificial Sequence: Synthetic polypeptide
EVQLVESGGGLVQPGRSLRLSCAASGFTFDDYAMHWVRQAPGKGLEWVSGISWDSGSSGYADSVKGRFTISRDNAKNSLYLQMNSLRAEDTALYYCARDLGFNQWVEGFDYWGQGTLVTVSS

SEQ ID NO: 165 - protein, 122 aa, Artificial Sequence; identical to SEQ ID NO: 152
  Description of Artificial Sequence: Synthetic polypeptide

SEQ ID NO: 166 - protein, 109 aa, Artificial Sequence
  Description of Artificial Sequence: Synthetic polypeptide
SSELTQDPAVSVALGQTVRITCQGDSLRSYYASWYQQKPGQAPVLVIYGKNNRPSGIPDRFSGSSSGNTASLTITGAQAEDEADYYCNSRDWPGNQWVFGGGTKVTVLG

SEQ ID NO: 167 - protein, 109 aa, Artificial Sequence
  Description of Artificial Sequence: Synthetic polypeptide
SSELTQDPAVSVALGQTVRITCQGDSLRSYYASWYQQKPGQAPVLVIYGKNNRPSGIPDRFSGSSSGNTASLTITGAQAEDEADYYCNSRDVPGDQWVFGGGTKVTVLG

SEQ ID NO: 168 - protein, 109 aa, Artificial Sequence
  Description of Artificial Sequence: Synthetic polypeptide
SSELTQDPAVSVALGQTVRITCQGDSLRSYYASWYQQKPGQAPVLVIYGKNNRPSGIPDRFSGSSSGNTASLTITGAQAEDEADYYCNSRDTPGDQWVFGGGTKVTVLG

SEQ ID NO: 169 - protein, 109 aa, Artificial Sequence
  Description of Artificial Sequence: Synthetic polypeptide
SSELTQDPAVSVALGQTVRITCQGDSLRSYYASWYQQKPGQAPVLVIYGKNNRPSGIPDRFSGSSSGNTASLTITGAQAEDEADYYCNSRDTPGNKWVFGGGTKVTVIG

SEQ ID NO: 170 - protein, 109 aa, Artificial Sequence
  Description of Artificial Sequence: Synthetic polypeptide
SSELTQDPAVSVALGQTVRITCQGDSLRSYYASWYQQKPGQAPVLVIYGKNNRPSGIPDRFSGSSSGNTASLTITGAQAEDEADYYCESRDSPGNQWVFGGGTKVTVLG

SEQ ID NO: 171 - protein, 109 aa, Artificial Sequence; identical to SEQ ID NO: 168
  Description of Artificial Sequence: Synthetic polypeptide

SEQ ID NO: 172 - protein, 109 aa, Artificial Sequence
  Description of Artificial Sequence: Synthetic polypeptide
SSELTQDPAVSVALGQTVRITCQGDSLRSYYASWYQQKPGQAPVLVIYGKNNRPSGIPDRFSGSSSGNTASLTITGAQAEDEADYYCMSRDSPGNQWVFGGGTKVTVLG

SEQ ID NO: 173 - protein, 109 aa, Artificial Sequence
  Description of Artificial Sequence: Synthetic polypeptide
SSELTQDPAVSVALGQTVRITCQGDSLRSYYASWYQQKPGQAPVLVIYGKNNRPSGIPDRFSGSSSGNTASLTITGAQAEDEADYYCMSRDHPGNQWVFGGGTKVTVLG

SEQ ID NO: 174 - protein, 109 aa, Artificial Sequence
  Description of Artificial Sequence: Synthetic polypeptide
SYELTQDPAVSVALGQTVRITCQGDSLRSYYASWYQQKPGQAPVLVIYGKNNRPSGIPDRFSGSTSGNSASLTITGAQAEDEADYYCNSRDSPGNQWVFGGGTKVTVLG

SEQ ID NO: 175 - protein, 109 aa, Artificial Sequence
  Description of Artificial Sequence: Synthetic polypeptide
SYELTQDPAVSVALGQTVRITCQGDSLRSYYASWYQQKPGQAPVLVIYGKNNRPSGIPDRFSGSTSGNSASLTITGAQAEDEADYYCNSRDSSGNHWVFGGGTKVTVLG

SEQ ID NO: 176 - protein, 109 aa, Artificial Sequence
  Description of Artificial Sequence: Synthetic polypeptide
SSELTQDPAVSVALGQTVRITCQGDSLRSYYASWYQQKPGQAPVLVIYGKNNRPSGIPDRFSGSSSGNTASLTITGAQAEDEADYYCNSRDYPGNSWVFGGGTKVTVLG

SEQ ID NO: 177 - protein, 109 aa, Artificial Sequence
  Description of Artificial Sequence: Synthetic polypeptide
SSELTQDPAVSVALGQTVRITCQGDSLRSYYASWYQQKPGQAPVLVIYGKNNRPSGIPDRFSGSSSGNTASLTITGAQAEDEADYYCESRDSPGNVWVFGGGTKVTVLG

SEQ ID NO: 178 - protein, 109 aa, Artificial Sequence
  Description of Artificial Sequence: Synthetic polypeptide
SSELTQDPAVSVALGQTVRITCQGDSLRSYYASWYQQKPGQAPVLVIYGKNNRPSGIPDRFSGSSSGNTASLTITGAQAEDEADYYCNSRDSPGNRWVFGGGTKVTVLG

SEQ ID NO: 179 - protein, 109 aa, Artificial Sequence
  Description of Artificial Sequence: Synthetic polypeptide
SSELTQDPAVSVALGQTVRITCQGDSLRSYYASWYQQKPGQAPVLVIYGKNNRPSGIPDRFSGSSSGNTASLTITGAQAEDEADYYCNSRDTPGNTWVFGGGTKVTVLG

SEQ ID NO: 180 - protein, 109 aa, Artificial Sequence; identical to SEQ ID NO: 179
  Description of Artificial Sequence: Synthetic polypeptide

SEQ ID NO: 181 - protein, 109 aa, Artificial Sequence
  Description of Artificial Sequence: Synthetic polypeptide
SSELTQDPAVSVALGQTVRITCQGDSLRSYYASWYQQKPGQAPVLVIYGKNNRPSGIPDRFSGSSSGNTASLTITGAQAEDEADYYCNSRDTPGNKWVFGGGTKVTVLG

SEQ ID NO: 182 - protein, 109 aa, Artificial Sequence
  Description of Artificial Sequence: Synthetic polypeptide
SSELTQDPAVSVALGQTVRITCQGDSLRSYYASWYQQKPGQAPVLVIYGKNNRPSGIPDRFSGSSSGNTASLTITGAQAEDEADYYCNSRDVPGNQWVFGGGTKVTVLG

SEQ ID NO: 183 - protein, 109 aa, Artificial Sequence
  Description of Artificial Sequence: Synthetic polypeptide
SSELTQDPAVSVALGQTVRITCQGDSLRSYYASWYQQKPGQAPVLVIYGKNNRPSGIPDRFSGSSSGNTASLTITGAQAEDEADYYCNSRDNPGNQWVFGGGTKVTVLG

SEQ ID NO: 184 - protein, 109 aa, Artificial Sequence
  Description of Artificial Sequence: Synthetic polypeptide
SSELTQDPAVSVALGQTVRITCQGDSLRSYYASWYQQKPGQAPVLVIYGKNNRPSGIPDRFSGSSSGNTASLTITGAQAEDEADYYCNSRDHPGNNWVFGGGTKVTVLG

SEQ ID NO: 185 - protein, 109 aa, Artificial Sequence
  Description of Artificial Sequence: Synthetic polypeptide
SSELTQDPAVSVALGQTVRITCQGDSLRSYYASWYQQKPGQAPVLVIYGKNNRPSGIPDRFSGSSSGNTASLTITGAQAEDEADYYCNSRDYPGNQWVFGGGTKVTVIG

SEQ ID NO: 186 - protein, 109 aa, Artificial Sequence
  Description of Artificial Sequence: Synthetic polypeptide
SSELTQDPAVSVALGQTVRITCQGDSLRSYYASWYQQKPGQAPVLVIYGKNNRPSGIPDRFSGSSSGNTASLTITGAQAEDEADYYCNSRDYPGDKWVFGGGTKVTVLG

SEQ ID NO: 187 - protein, 109 aa, Artificial Sequence; identical to SEQ ID NO: 186
  Description of Artificial Sequence: Synthetic polypeptide

SEQ ID NO: 188 - protein, 109 aa, Artificial Sequence; identical to SEQ ID NO: 186
  Description of Artificial Sequence: Synthetic polypeptide

SEQ ID NO: 189 - protein, 109 aa, Artificial Sequence
  Description of Artificial Sequence: Synthetic polypeptide
SSELTQDPAVSVALGQTVRITCQGDSLRSYYASWYQQKPGQAPVLVIYGKNNRPSGIPDRFSGSSSGNTASLTITGAQAEDEADYYCNSRDSPGDQWVFGGGTKVTVLG

SEQ ID NO: 190 - protein, 109 aa, Artificial Sequence; identical to SEQ ID NO: 167
  Description of Artificial Sequence: Synthetic polypeptide

SEQ ID NO: 191 - protein, 109 aa, Artificial Sequence; identical to SEQ ID NO: 168
  Description of Artificial Sequence: Synthetic polypeptide

SEQ ID NO: 192 - protein, 109 aa, Artificial Sequence
  Description of Artificial Sequence: Synthetic polypeptide
SSELTQDPAVSVALGQTVRITCQGDSLRSYYASWYQQKPGQAPVLVIYGKNNRPSGIPDRFSGSSSGNTASLTITGAQAEDEADYYCMSRDYPGNNWVFGGGTKVTVLG

SEQ ID NO: 193 - protein, 109 aa, Artificial Sequence
  Description of Artificial Sequence: Synthetic polypeptide
SSELTQDPAVSVALGQTVRITCQGDSLRSYYASWYQQKPGQAPVLVIYGKNNRPSGIPDRFSGSSSGNTASLTITGAQAEDEADYYCMSRDYPGNHWVFGGGTKVTVLG

SEQ ID NO: 194 - protein, 109 aa, Artificial Sequence
  Description of Artificial Sequence: Synthetic polypeptide
SSELTQDPAVSVALGQTVRITCQGDSLRSYYASWYQQKPGQAPVLVIYGKNNRPSGIPDRFSGSSSGNTASLTITGAQAEDEADYYCESRDAPGDQWVFGGGTKVTVLG

SEQ ID NO: 195 - protein, 109 aa, Artificial Sequence
  Description of Artificial Sequence: Synthetic polypeptide
SSELTQDPAVSVALGQTVRITCQGDSLRSYYASWYQQKPGQAPVLVIYGKNNRPSGIPDRFSGSSSGNTASLTITGAQAEDEADYYCNSRDSPGNQWVFGGGTKVTVLG

SEQ ID NO: 196 - protein, 109 aa, Artificial Sequence
  Description of Artificial Sequence: Synthetic polypeptide
SSELTQDPAVSVALGQTVRITCQGDSLRSYYASWYQQKPGQAPVLVIYGKNNRPSGIPDRFSGSSSGNTASLTITGAQAEDEADYYCNSRDSPGNNWVFGGGTKVTVLG

SEQ ID NO: 197 - protein, 109 aa, Artificial Sequence
  Description of Artificial Sequence: Synthetic polypeptide
SSELTQDPAVSVALGQTVRITCQGDSLRSYYASWYQQKPGQAPVLVIYGKNNRPSGIPDRFSGSSSGNTASLTITGAQAEDEADYYCNSRDYPGNNWVFGGGTKVTVLG

SEQ ID NO: 198 - protein, 109 aa, Artificial Sequence; identical to SEQ ID NO: 166
  Description of Artificial Sequence: Synthetic polypeptide

SEQ ID NO: 199 - protein, 109 aa, Artificial Sequence; identical to SEQ ID NO: 166
  Description of Artificial Sequence: Synthetic polypeptide

SEQ ID NO: 200 - protein, 109 aa, Artificial Sequence; identical to SEQ ID NO: 167
  Description of Artificial Sequence: Synthetic polypeptide

SEQ ID NO: 201 - DNA, 648 bp, Artificial Sequence
  Description of Artificial Sequence: Synthetic polynucleotide
gacattcagatgacccagagcccctcatcactgtccgcgtcaacgggggatagggtcactatcacttgcagagcatcgcaggggatcagctcctatctcgcgtggtatcagcagaagccaggaaaggcaccgaagctgcttatctacgccgcctcgacattgcagtcgggcgtacctagccgcttctcgggatcaggatcgggtacggactttactttgacaattagcagcctccaacccgaggatttcgctacgtactattgccagcagtacttcacatttccgttgaccttcggtggagggactaaggtggagatcaagcgtacggtcgcagctccttcggtattcatctttccgccctccgatgagcagctcaaatccggtacagcctcggtggtgtgcctgctgaataacttctatccccgggaggcgaaagtgcagtggaaagtggacaacgcgctccaatcaggaaattcccaagaatcagtcacagaacaggattcgaaagactcgacctactcactttcgtcgaccttgacgctctccaaggccgactacgagaaacacaaggtgtatgcgtgtgaagtcacacatcaagggctttcatccccagtcacgaagtcattcaaccgcggtgaatgttgataa

SEQ ID NO: 202 - protein, 214 aa, Artificial Sequence
  Description of Artificial Sequence: Synthetic polypeptide
DIQMTQSPSSLSASTGDRVTITCRASQGISSYLAWYQQKPGKAPKLLIYAASTLQSGVPSRFSGSGSGTDFTLTISSLQPEDFATYYCQQYFTFPLTFGGGTKVEIKRTVAAPSVFIFPPSDEQLKSGTASVVCLLNNFYPREAKVQWKVDNALQSGNSQESVTEQDSKDSTYSLSSTLTLSKADYEKHKVYACEVTHQGLSSPVTKSFNRGEC

SEQ ID NO: 203 - DNA, 648 bp, Artificial Sequence
  Description of Artificial Sequence: Synthetic polynucleotide
gatattcaaatgacacagtcaccctcgtcactcagcgccagccttggggaccgcgtaacgatcacgtgtagagcgtcgcaggggatttcctcgtatctggcgtggtatcagcaaaagcctggtaaagctccgaaactcctgatctacgccaagtcgaccttgcagtccggagtcccctcaaggttcagcgggtcgggatccggtacagatttcaccctgaccatctcaagcctccagccagaggactccgcaacgtactattgccagcagtactggacgtttcctttgacttttggaggcggaacaaaggtggaaatcaaacgtacggtcgcagctccttcggtattcatctttccgccctccgatgagcagctcaaatccggtacagcctcggtggtgtgcctgctgaataacttctatccccgggaggcgaaagtgcagtggaaagtggacaacgcgctccaatcaggaaattcccaagaatcagtcacagaacaggattcgaaagactcgacctactcactttcgtcgaccttgacgctctccaaggccgactacgagaaacacaaggtgtatgcgtgtgaagtcacacatcaagggctttcatccccagtcacgaagtcattcaaccgcggtgaatgttgataa

SEQ ID NO: 204 - protein, 214 aa, Artificial Sequence
  Description of Artificial Sequence: Synthetic polypeptide
DIQMTQSPSSLSASLGDRVTITCRASQGISSYLAWYQQKPGKAPKLLIYAKSTLQSGVPSRFSGSGSGTDFTLTISSLQPEDSATYYCQQYWTFPLTFGGGTKVEIKRTVAAPSVFIFPPSDEQLKSGTASVVCLLNNFYPREAKVQWKVDNALQSGNSQESVTEQDSKDSTYSLSSTLTLSKADYEKHKVYACEVTHQGLSSPVTKSFNRGEC

SEQ ID NO: 205 - DNA, 648 bp, Artificial Sequence
  Description of Artificial Sequence: Synthetic polynucleotide
gatatccagatgacacagtcaccgtcctcattgtcagcgtcgctgggggaccgagtgacgattacgtgtcgcgcgtcacaggggatctccagctatctcgcgtggtatcaacagaagccgggcaaagcccccaagctccttatctacgcctccagcacaagacaaagcggagtaccaagccggttctcggggtcgggatcgggaacagactttacacttactatttcgtcgctgcagcccgaagattcgggaacctactattgccagcagtactgggcattccccctgacgttcggcggtggtactaaagtcgagatcaagcgtacggtcgcagctccttcggtattcatctttccgccctccgatgagcagctcaaatccggtacagcctcggtggtgtgcctgctgaataacttctatccccgggaggcgaaagtgcagtggaaagtggacaacgcgctccaatcaggaaattcccaagaatcagtcacagaacaggattcgaaagactcgacctactcactttcgtcgaccttgacgctctccaaggccgactacgagaaacacaaggtgtatgcgtgtgaagtcacacatcaagggctttcatccccagtcacgaagtcattcaaccgcggtgaatgttgataa

SEQ ID NO: 206 - protein, 214 aa, Artificial Sequence
  Description of Artificial Sequence: Synthetic polypeptide
DIQMTQSPSSLSASLGDRVTITCRASQGISSYLAWYQQKPGKAPKLLIYASSTRQSGVPSRFSGSGSGTDFTLTISSLQPEDSGTYYCQQYWAFPLTFGGGTKVEIKRTVAAPSVFIFPPSDEQLKSGTASVVCLLNNFYPREAKVQWKVDNALQSGNSQESVTEQDSKDSTYSLSSTLTLSKADYEKHKVYACEVTHQGLSSPVTKSFNRGEC

SEQ ID NO: 207 - DNA, 648 bp, Artificial Sequence
  Description of Artificial Sequence: Synthetic polynucleotide
gatatccagttgacccagtcgccctcgtccctctcggcatcactgggtgaccgggtgactattacgtgtagagcgtcacagggaatctcaagctatttggcctggtatcagcaaaagccggggaaagcccctaagctcctgatctacgcgcgctcgacgcgacagagcggagtacccagcaggttttccggatcggggtcaggtacagaattcacccttacgatttcgtcgctccaacccgaggactccgcgacgtactactgccagcaatactggacttggccgctcacgtttgggggaggcacgaaggtcgagatcaaacgtacggtcgcagctccttcggtattcatctttccgccctccgatgagcagctcaaatccggtacagcctcggtggtgtgcctgctgaataacttctatccccgggaggcgaaagtgcagtggaaagtggacaacgcgctccaatcaggaaattcccaagaatcagtcacagaacaggattcgaaagactcgacctactcactttcgtcgaccttgacgctctccaaggccgactacgagaaacacaaggtgtatgcgtgtgaagtcacacatcaagggctttcatccccagtcacgaagtcattcaaccgcggtgaatgttgataa

SEQ ID NO: 208 - protein, 214 aa, Artificial Sequence
  Description of Artificial Sequence: Synthetic polypeptide
DIQLTQSPSSLSASLGDRVTITCRASQGISSYLAWYQQKPGKAPKLLIYARSTRQSGVPSRFSGSGSGTEFTLTISSLQPEDSATYYCQQYWTWPLTFGGGTKVEIKRTVAAPSVFIFPPSDEQLKSGTASVVCLLNNFYPREAKVQWKVDNALQSGNSQESVTEQDSKDSTYSLSSTLTLSKADYEKHKVYACEVTHQGLSSPVTKSFNRGEC

SEQ ID NO: 209 - DNA, 2166 bp, Artificial Sequence
  Description of Artificial Sequence: Synthetic polynucleotide
gaggtgcagctcctccaaagcggagggggtttggtccagcccggtggctcgttgcgcctctcatgtgccgcgtcggggtttacattcagcgtctatccgatgcactgggtacgacaggcgccagggaaaggactggagtgggtgtcatcgatcagcagctccggaggtgctacaagatatgccgactcggtgaaaggccgctttacgatcagccgcgataacagcaagaatacgttgtacctccaaatgaactcgctgcgagccgaggacactgcggtgtactattgcgcgaaggatttctatgacatccttactggtaatgcgtttgatatctggggccaggggacaacggtcaccgtgagctcggccagcacgaaggggcctagcgtctttccgctcgccccctcgtcaaaatcaacgtcgggtggaacggccgcattgggttgtctcgtaaaggactactttccggaacccgtcaccgtatcgtggaattcaggcgccctgacttccggggtccacacctttcccgctgtcttgcagtcctcgggtttgtattcactgtcgtcagtggtgacagtaccatcatcctcactgggaactcaaacgtacatctgcaacgtgaaccacaagccgagcaacactaaggtggataagaaggtagagcccaagtcatgcgacaaaacgcatacatgcccgccatgccccgcaccagaacttttgggaggtccgtcagtgtttctctttccgcctaagcccaaagacacactgatgatttcccggacgcccgaagtcacttgtgtggtcgtcgacgtgtcccatgaagatcccgaagtaaagttcaactggtatgtcgacggtgtggaagtccacaatgcaaaaaccaagcccagggaagaacagtacaacagcacatatcgagtggtgagcgtgttgaccgtgctgcaccaagactggctcaatggaaaggagtacaaatgcaaagtgtccaacaaggcactgcctgcgcccattgagaaaacgatttcgaaagcaaagggacagccaagagaaccccaagtgtatacccttcccccgtcgcgcgaggaaatgacgaagaaccaggtatcgttgacgtgtcttgtaaagggattctatccctcggacatcgcggtcgagtgggagtccaacggacagccagagaataactacaaaaccacaccgcctgtgctggattccgacgggtcgtttttcttgtattcgaagcttacggtagacaaaagccggtggcagcagggtaatgtgttcagctgctcagtaatgcacgaggctctccataatcattacactcagaagtccctttccctttcgccgggagggggtgggggatccggcggaggtgggtcgggaggtggaggatcacaagtgcaattggtacagtcgggaggcgggcttgtgcaacccggagggtcactgcgcctttcatgtgcggcgagcggtttcacgttcgatgattatgcgatgcattgggtacggcaggcacctggcaaagggttggagtgggtagccggaatctcgtggaatagcgggagcatcggttatgcggattccgtcaaagggaggtttacaatttcgagggacaatgcgaagaacagcctgtatctccaaatgaattcgctcaggcccgaagataccgccgtctactactgcgcgagggacttgggatacaaccagtgggtggaagggtttgattactgggggcaggggactctggtaactgtctcatcggcatcgactggtggtggcgggtccggagggggaggaagcggaggaggcgggagcggaggcggtgggtccagctacgaactgactcaagatccggccgtatcggtggccctcggacaaacagtgcgaatcacctgtcagggggatagccttagatcgtactacgcttcgtggtatcagcaaaagcccggacaggcaccagtgcttgtgatctacggaaagaacaatagaccgagcggaattccggatcggttttcgggttcgacttccggaaattcggcgtcgctcacgatcaccggagctcaggcagaggatgaagcggattactattgtaattcccgcgattcgtcggggaatcattgggtgttcggtgggggtacaaaggtaactgtactcggctgataa

SEQ ID NO: 210 - protein, 720 aa, Artificial Sequence
  Description of Artificial Sequence: Synthetic polypeptide
EVQLLQSGGGLVQPGGSLRLSCAASGFTFSVYPMHWVRQAPGKGLEWVSSISSSGGATRYADSVKGRFTISRDNSKNTLYLQMNSLRAEDTAVYYCAKDFYDILTGNAFDIWGQGTTVTVSSASTKGPSVFPLAPSSKSTSGGTAALGCLVKDYFPEPVTVSWNSGALTSGVHTFPAVLQSSGLYSLSSVVTVPSSSLGTQTYICNVNHKPSNTKVDKKVEPKSCDKTHTCPPCPAPELLGGPSVFLFPPKPKDTLMISRTPEVTCVVVDVSHEDPEVKFNWYVDGVEVHNAKTKPREEQYNSTYRVVSVLTVLHQDWLNGKEYKCKVSNKALPAPIEKTISKAKGQPREPQVYTLPPSREEMTKNQVSLTCLVKGFYPSDIAVEWESNGQPENNYKTTPPVLDSDGSFFLYSKLTVDKSRWQQGNVFSCSVMHEALHNHYTQKSLSLSPGGGGGSGGGGSGGGGSQVQLVQSGGGLVQPGGSLRLSCAASGFTFDDYAMHWVRQAPGKGLEWVAGISWNSGSIGYADSVKGRFTISRDNAKNSLYLQMNSLRPEDTAVYYCARDLGYNQWVEGFDYWGQGTLVTVSSASTGGGGSGGGGSGGGGSGGGGSSYELTQDPAVSVALGQTVRITCQGDSLRSYYASWYQQKPGQAPVLVIYGKNNRPSGIPDRFSGSTSGNSASLTITGAQAEDEADYYCNSRDSSGNHWVFGGGTKVTVLG

SEQ ID NO: 211 - DNA, 2154 bp, Artificial Sequence
  Description of Artificial Sequence: Synthetic polynucleotide
gaggtccagctcctccagtcaggtggaggactggtgcaacccggaggttcacttcggctgtcgtgtgcggcatcgggattcacgttttcggtgtatccgatgcattgggtgcgacaagctccgggcaaagggcttgaatgggtgtcgtccatctcgtcgtcgggaggagcaacgaggtatgccgattccgtaaagggtaggttcaccatctcacgcgacaattccaagaatacgttgtacctgcagatgaattcgcttagggcagaagatacggccgtgtactattgcgcaaaagatttctatgacattcttactggtaatgcgttcgatatctggggtcagggaactaccgtaacggtgtcgagcgctagcactaagggaccgtccgtgtttcccctcgcgcctagctcgaagagcacatcgggaggaacagcggcgctcggctgtctcgtcaaagactacttccccgagccggtgaccgtgagctggaattccggagcgttgacctcaggggtgcatacattccctgccgtactgcaatcatcagggctctactcattgtcgagcgtagtgactgtaccgtcgtcatcgctcggaacgcagacgtacatctgcaatgtcaatcacaagccctccaatactaaggtagataagaaagtagaaccgaagtcgtgtgataagacccatacatgccctccgtgccccgcaccggaactcttgggtggcccatcagtctttctgttcccgccaaagcccaaagacacactgatgatttcgcgcacgcccgaagtcacttgcgtcgtggtggatgtgtcgcatgaggacccggaggtcaagttcaactggtacgtcgatggtgtagaagtccacaacgccaagaccaagcctcgggaggagcagtataactccacctaccgggtagtgagcgtgcttacagtgctccatcaggactggctgaacggcaaagaatacaaatgcaaagtcagcaacaaagcgctgccagcgcccatcgagaaaacaattagcaaagcgaaagggcagcccagagaacctcaagtgtatacattgccgccgtcgcgggaggaaatgacaaagaatcaggtatccctgacgtgtcttgtgaaaggcttttacccatccgacattgcggtagagtgggagtcgaatgggcaacccgagaacaactataagacgactcccccagtcttggattcagacggatcctttttcttgtactcgaaactcacagtcgacaagtccagatggcagcaggggaacgtgttcagctgcagcgtgatgcacgaggcccttcacaaccactatacgcagaaatcattaagcttatcgccaggtaaaggaggtggcgggagcgggggagggggatccggtggcggagggtcggaagtgcagctggtggagagcggaggtgggcttgtccaaccgggcaggtcacttagattgtcatgtgcggcgagcggttttacctttgacgattatgcgatgcactgggtccgccaggcaccggggaaggggctcgaatgggtatcaggaatctcgtgggactcggggtccacgggctatgcggactcggtcaaggggcgcttcacaatctcaagggacaatgccaaaaactcgctctatcttcagatgaactcattgcgagctgaggacacggcgctttactactgtgcgcgggatttgggtgcctatcaatgggtagaagggtttgattactgggggcagggaactctcgtgaccgtgtccagcgcatcgacgggaggaggaggttccgggggtgggggaagcgggggtggagggtcatcgtcagagctgacgcaagatcccgcggtatccgtcgcccttgggcagaccgtcaggattacgtgccagggagactcacttagaagctactacgcttcctggtatcagcaaaagccgggacaggcacccgtgttggtgatctacgggaagaataaccggcccagcgggattcctgaccgcttttcgggctcctcatcggggaacacagcctcgttgactatcacgggtgcgcaagccgaggacgaggcagactattactgtgaatcgcgagattcccctggtaatcagtgggtctttgggggaggaactaaggtaacggtattggggtgataa

SEQ ID NO: 212 - protein, 715 aa, Artificial Sequence
  Description of Artificial Sequence: Synthetic polypeptide
EVQLLQSGGGLVQPGGSLRLSCAASGFTFSVYPMHWVRQAPGKGLEWVSSISSSGGATRYADSVKGRFTISRDNSKNTLYLQMNSLRAEDTAVYYCAKDFYDILTGNAFDIWGQGTTVTVSSASTKGPSVFPLAPSSKSTSGGTAALGCLVKDYFPEPVTVSWNSGALTSGVHTFPAVLQSSGLYSLSSVVTVPSSSLGTQTYICNVNHKPSNTKVDKKVEPKSCDKTHTCPPCPAPELLGGPSVFLFPPKPKDTLMISRTPEVTCVVVDVSHEDPEVKFNWYVDGVEVHNAKTKPREEQYNSTYRVVSVLTVLHQDWLNGKEYKCKVSNKALPAPIEKTISKAKGQPREPQVYTLPPSREEMTKNQVSLTCLVKGFYPSDIAVEWESNGQPENNYKTTPPVLDSDGSFFLYSKLTVDKSRWQQGNVFSCSVMHEALHNHYTQKSLSLSPGGGGGSGGGGSGGGGSEVQLVESGGGLVQPGRSLRLSCAASGFTFDDYAMHWVRQAPGKGLEWVSGISWDSGSTGYADSVKGRFTISRDNAKNSLYLQMNSLRAEDTALYYCARDLGAYQWVEGFDYWGQGTLVTVSSASTGGGGSGGGGSGGGGSSSELTQDPAVSVALGQTVRITCQGDSLRSYYASWYQQKPGQAPVLVIYGKNNRPSGIPDRFSGSSSGNTASLTITGAQAEDEADYYCESRDSPGNQWVFGGGTKVTVLG

SEQ ID NO: 213 - DNA, 2169 bp, Artificial Sequence
  Description of Artificial Sequence: Synthetic polynucleotide
gaggtccagctcctccagtcaggtggaggactggtgcaacccggaggttcacttcggctgtcgtgtgcggcatcgggattcacgttttcggtgtatccgatgcattgggtgcgacaagctccgggcaaagggcttgaatgggtgtcgtccatctcgtcgtcgggaggagcaacgaggtatgccgattccgtaaagggtaggttcaccatctcacgcgacaattccaagaatacgttgtacctgcagatgaattcgcttagggcagaagatacggccgtgtactattgcgcaaaagatttctatgacattcttactggtaatgcgttcgatatctggggtcagggaactaccgtaacggtgtcgagcgctagcactaagggaccgtccgtgtttcccctcgcgcctagctcgaagagcacatcgggaggaacagcggcgctcggctgtctcgtcaaagactacttccccgagccggtgaccgtgagctggaattccggagcgttgacctcaggggtgcatacattccctgccgtactgcaatcatcagggctctactcattgtcgagcgtagtgactgtaccgtcgtcatcgctcggaacgcagacgtacatctgcaatgtcaatcacaagccctccaatactaaggtagataagaaagtagaaccgaagtcgtgtgataagacccatacatgccctccgtgccccgcaccggaactcttgggtggcccatcagtctttctgttcccgccaaagcccaaagacacactgatgatttcgcgcacgcccgaagtcacttgcgtcgtggtggatgtgtcgcatgaggacccggaggtcaagttcaactggtacgtcgatggtgtagaagtccacaacgccaagaccaagcctcgggaggagcagtataactccacctaccgggtagtgagcgtgcttacagtgctccatcaggactggctgaacggcaaagaatacaaatgcaaagtcagcaacaaagcgctgccagcgcccatcgagaaaacaattagcaaagcgaaagggcagcccagagaacctcaagtgtatacattgccgccgtcgcgggaggaaatgacaaagaatcaggtatccctgacgtgtcttgtgaaaggcttttacccatccgacattgcggtagagtgggagtcgaatgggcaacccgagaacaactataagacgactcccccagtcttggattcagacggatcctttttcttgtactcgaaactcacagtcgacaagtccagatggcagcaggggaacgtgttcagctgcagcgtgatgcacgaggcccttcacaaccactatacgcagaaatcattaagcttatcgccaggtaaaggaggtggcgggagcgggggagggggatccggtggcggagggtcgcaagtgcagctggtgcaaagcggaggtgggcttgtccaacccggaggctcacttagattgtcatgtgcggcgagcggttttacctttgacgattatgcgatgcactgggtccgccaggcaccggggaaggggctcgaatgggtagccggaatctcgtgggactcggggtccacgggctatgcggactcggtcaaggggcgcttcacaatctcaagggacaatgccaaaaactcgctctatctgcagatgaactcattgcgagctgaggacacggcgctttactactgtgcgcgggatttgggtgcctatcaatgggtagaagggtttgattactgggggcagggaactctcgtgaccgtgtccagcgcatcgacgggaggaggaggttccgggggtgggggaagcgggggtggagggtcaggaggtgggggatcgtcatacgagctgacgcaagatcccgcggtatccgtcgcccttgggcagaccgtcaggattacgtgccagggagactcacttagaagctactacgcttcctggtatcagcaaaagccgggacaggcacccgtgttggtgatctacgggaagaataaccggcccagcgggattcctgaccgcttttcgggctccacctcagggaactcggcctcgttgactatcacgggtgcgcaagccgaggacgaggcagactattactgtaactcgcgagattcccctggtaatcagtgggtctttgggggaggaactaaggtaacggtattggggtgataa

SEQ ID NO: 214 - protein, 720 aa, Artificial Sequence
  Description of Artificial Sequence: Synthetic polypeptide
EVQLLQSGGGLVQPGGSLRLSCAASGFTFSVYPMHWVRQAPGKGLEWVSSISSSGGATRYADSVKGRFTISRDNSKNTLYLQMNSLRAEDTAVYYCAKDFYDILTGNAFDIWGQGTTVTVSSASTKGPSVFPLAPSSKSTSGGTAALGCLVKDYFPEPVTVSWNSGALTSGVHTFPAVLQSSGLYSLSSVVTVPSSSLGTQTYICNVNHKPSNTKVDKKVEPKSCDKTHTCPPCPAPELLGGPSVFLFPPKPKDTLMISRTPEVTCVVVDVSHEDPEVKFNWYVDGVEVHNAKTKPREEQYNSTYRVVSVLTVLHQDWLNGKEYKCKVSNKALPAPIEKTISKAKGQPREPQVYTLPPSREEMTKNQVSLTCLVKGFYPSDIAVEWESNGQPENNYKTTPPVLDSDGSFFLYSKLTVDKSRWQQGNVFSCSVMHEALHNHYTQKSLSLSPGGGGGSGGGGSGGGGSQVQLVQSGGGLVQPGGSLRLSCAASGFTFDDYAMHWVRQAPGKGLEWVAGISWDSGSTGYADSVKGRFTISRDNAKNSLYLQMNSLRAEDTALYYCARDLGAYQWVEGFDYWGQGTLVTVSSASTGGGGSGGGGSGGGGSGGGGSSYELTQDPAVSVALGQTVRITCQGDSLRSYYASWYQQKPGQAPVLVIYGKNNRPSGIPDRFSGSTSGNSASLTITGAQAEDEADYYCNSRDSPGNQWVFGGGTKVTVLG

SEQ ID NO: 215 - DNA, 2154 bp, Artificial Sequence
  Description of Artificial Sequence: Synthetic polynucleotide
gaggtccagctcctccagtcaggtggaggactggtgcaacccggaggttcacttcggctgtcgtgtgcggcatcgggattcacgttttcggtgtatccgatgcattgggtgcgacaagctccgggcaaagggcttgaatgggtgtcgtccatctcgtcgtcgggaggagcaacgaggtatgccgattccgtaaagggtaggttcaccatctcacgcgacaattccaagaatacgttgtacctgcagatgaattcgcttagggcagaagatacggccgtgtactattgcgcaaaagatttctatgacattcttactggtaatgcgttcgatatctggggtcagggaactaccgtaacggtgtcgagcgctagcactaagggaccgtccgtgtttcccctcgcgcctagctcgaagagcacatcgggaggaacagcggcgctcggctgtctcgtcaaagactacttccccgagccggtgaccgtgagctggaattccggagcgttgacctcaggggtgcatacattccctgccgtactgcaatcatcagggctctactcattgtcgagcgtagtgactgtaccgtcgtcatcgctcggaacgcagacgtacatctgcaatgtcaatcacaagccctccaatactaaggtagataagaaagtagaaccgaagtcgtgtgataagacccatacatgccctccgtgccccgcaccggaactcttgggtggcccatcagtctttctgttcccgccaaagcccaaagacacactgatgatttcgcgcacgcccgaagtcacttgcgtcgtggtggatgtgtcgcatgaggacccggaggtcaagttcaactggtacgtcgatggtgtagaagtccacaacgccaagaccaagcctcgggaggagcagtataactccacctaccgggtagtgagcgtgcttacagtgctccatcaggactggctgaacggcaaagaatacaaatgcaaagtcagcaacaaagcgctgccagcgcccatcgagaaaacaattagcaaagcgaaagggcagcccagagaacctcaagtgtatacattgccgccgtcgcgggaggaaatgacaaagaatcaggtatccctgacgtgtcttgtgaaaggcttttacccatccgacattgcggtagagtgggagtcgaatgggcaacccgagaacaactataagacgactcccccagtcttggattcagacggatcctttttcttgtactcgaaactcacagtcgacaagtccagatggcagcaggggaacgtgttcagctgcagcgtgatgcacgaggcccttcacaaccactatacgcagaaatcattaagcttatcgccaggtaaaggaggtggcgggagcgggggagggggatccggtggcggagggtcggaagtgcagctggtggagagcggaggtgggcttgtccaaccgggcaggtcacttagattgtcatgtgcggcgagcggttttacctttgacgattatgcgatgcactgggtccgccaggcaccggggaaggggctcgaatgggtatcaggaatctcgtggaattcggggtccacgggctatgcggactcggtcaaggggcgcttcacaatctcaagggacaatgccaaaaactcgctctatttgcaaatgaactcattgcgagctgaggacacggcgctttactactgtgcgcgggatttgggctttaaccaatgggtagacgggtttgattactgggggcagggaactctcgtgaccgtgtccagcgcatcgacgggaggaggaggttccgggggtgggggaagcgggggtggagggtcatcgtcagagctgacgcaagatcccgcggtatccgtcgcccttgggcagaccgtcaggattacgtgccagggagactcacttagaagctactacgcttcctggtatcagcaaaagccgggacaggcacccgtgttggtgatctacgggaagaataaccggcccagcgggattcctgaccgcttttcgggctcctcatcggggaacacagcctcgttgactatcacgggtgcgcaagccgaggacgaggcagactattactgtaactcgcgagatacgcctggtgaccagtgggtctttgggggaggaactaaggtaacggtattggggtgataa

SEQ ID NO: 216 - protein, 715 aa, Artificial Sequence
  Description of Artificial Sequence: Synthetic polypeptide
EVQLLQSGGGLVQPGGSLRLSCAASGFTFSVYPMHWVRQAPGKGLEWVSSISSSGGATRYADSVKGRFTISRDNSKNTLYLQMNSLRAEDTAVYYCAKDFYDILTGNAFDIWGQGTTVTVSSASTKGPSVFPLAPSSKSTSGGTAALGCLVKDYFPEPVTVSWNSGALTSGVHTFPAVLQSSGLYSLSSVVTVPSSSLGTQTYICNVNHKPSNTKVDKKVEPKSCDKTHTCPPCPAPELLGGPSVFLFPPKPKDTLMISRTPEVTCVVVDVSHEDPEVKFNWYVDGVEVHNAKTKPREEQYNSTYRVVSVLTVLHQDWLNGKEYKCKVSNKALPAPIEKTISKAKGQPREPQVYTLPPSREEMTKNQVSLTCLVKGFYPSDIAVEWESNGQPENNYKTTPPVLDSDGSFFLYSKLTVDKSRWQQGNVFSCSVMHEALHNHYTQKSLSLSPGGGGGSGGGGSGGGGSEVQLVESGGGLVQPGRSLRLSCAASGFTFDDYAMHWVRQAPGKGLEWVSGISWNSGSTGYADSVKGRFTISRDNAKNSLYLQMNSLRAEDTALYYCARDLGFNQWVDGFDYWGQGTLVTVSSASTGGGGSGGGGSGGGGSSSELTQDPAVSVALGQTVRITCQGDSLRSYYASWYQQKPGQAPVLVIYGKNNRPSGIPDRFSGSSSGNTASLTITGAQAEDEADYYCNSRDTPGDQWVFGGGTKVTVLG

SEQ ID NO: 217 - DNA, 2154 bp, Artificial Sequence
  Description of Artificial Sequence: Synthetic polynucleotide
gaggtccagctcctccagtcaggtggaggactggtgcaacccggaggttcacttcggctgtcgtgtgcggcatcgggattcacgttttcggtgtatccgatgcattgggtgcgacaagctccgggcaaagggcttgaatgggtgtcgtccatctcgtcgtcgggaggagcaacgaggtatgccgattccgtaaagggtaggttcaccatctcacgcgacaattccaagaatacgttgtacctgcagatgaattcgcttagggcagaagatacggccgtgtactattgcgcaaaagatttctatgacattcttactggtaatgcgttcgatatctggggtcagggaactaccgtaacggtgtcgagcgctagcactaagggaccgtccgtgtttcccctcgcgcctagctcgaagagcacatcgggaggaacagcggcgctcggctgtctcgtcaaagactacttccccgagccggtgaccgtgagctggaattccggagcgttgacctcaggggtgcatacattccctgccgtactgcaatcatcagggctctactcattgtcgagcgtagtgactgtaccgtcgtcatcgctcggaacgcagacgtacatctgcaatgtcaatcacaagccctccaatactaaggtagataagaaagtagaaccgaagtcgtgtgataagacccatacatgccctccgtgccccgcaccggaactcttgggtggcccatcagtctttctgttcccgccaaagcccaaagacacactgatgatttcgcgcacgcccgaagtcacttgcgtcgtggtggatgtgtcgcatgaggacccggaggtcaagttcaactggtacgtcgatggtgtagaagtccacaacgccaagaccaagcctcgggaggagcagtataactccacctaccgggtagtgagcgtgcttacagtgctccatcaggactggctgaacggcaaagaatacaaatgcaaagtcagcaacaaagcgctgccagcgcccatcgagaaaacaattagcaaagcgaaagggcagcccagagaacctcaagtgtatacattgccgccgtcgcgggaggaaatgacaaagaatcaggtatccctgacgtgtcttgtgaaaggcttttacccatccgacattgcggtagagtgggagtcgaatgggcaacccgagaacaactataagacgactcccccagtcttggattcagacggatcctttttcttgtactcgaaactcacagtcgacaagtccagatggcagcaggggaacgtgttcagctgcagcgtgatgcacgaggcccttcacaaccactatacgcagaaatcattaagcttatcgccaggtaaaggaggtggcgggagcgggggagggggatccggtggcggagggtcggaagtgcagctggtggagagcggaggtgggcttgtccaaccgggcaggtcacttagattgtcatgtgcggcgagcggttttacctttgacgattatgcgatgcactgggtccgccaggcaccggggaaggggctcgaatgggtatcaggaatctcgtggaactcggggtccacgggctatgcggactcggtcaaggggcgcttcacaatctcaagggacaatgccaaaaactcgctctatctccagatgaactcattgcgagctgaggacacggcgctttactactgtgcgcgggatttgggttacaaccaatggcttgaagggtttgattactgggggcagggaactctcgtgaccgtgtccagcgcatcgacgggaggaggaggttccgggggtgggggaagcgggggtggagggtcatcgtcagagctgacgcaagatcccgcggtatccgtcgcccttgggcagaccgtcaggattacgtgccagggagactcacttagaagctactacgcttcctggtatcagcaaaagccgggacaggcacccgtgttggtgatctacgggaagaataaccggcccagcgggattcctgaccgcttttcgggctcctcatcggggaacacagcctcgttgactatcacgggtgcgcaagccgaggacgaggcagactattactgtatgtcgcgagatcaccctggtaatcagtgggtctttgggggaggaactaaggtaacggtattggggtgataa

SEQ ID NO: 218 - protein, 715 aa, Artificial Sequence
  Description of Artificial Sequence: Synthetic polypeptide
EVQLLQSGGGLVQPGGSLRLSCAASGFTFSVYPMHWVRQAPGKGLEWVSSISSSGGATRYADSVKGRFTISRDNSKNTLYLQMNSLRAEDTAVYYCAKDFYDILTGNAFDIWGQGTTVTVSSASTKGPSVFPLAPSSKSTSGGTAALGCLVKDYFPEPVTVSWNSGALTSGVHTFPAVLQSSGLYSLSSVVTVPSSSLGTQTYICNVNHKPSNTKVDKKVEPKSCDKTHTCPPCPAPELLGGPSVFLFPPKPKDTLMISRTPEVTCVVVDVSHEDPEVKFNWYVDGVEVHNAKTKPREEQYNSTYRVVSVLTVLHQDWLNGKEYKCKVSNKALPAPIEKTISKAKGQPREPQVYTLPPSREEMTKNQVSLTCLVKGFYPSDIAVEWESNGQPENNYKTTPPVLDSDGSFFLYSKLTVDKSRWQQGNVFSCSVMHEALHNHYTQKSLSLSPGGGGGSGGGGSGGGGSEVQLVESGGGLVQPGRSLRLSCAASGFTFDDYAMHWVRQAPGKGLEWVSGISWNSGSTGYADSVKGRFTISRDNAKNSLYLQMNSLRAEDTALYYCARDLGYNQWLEGFDYWGQGTLVTVSSASTGGGGSGGGGSGGGGSSSELTQDPAVSVALGQTVRITCQGDSLRSYYASWYQQKPGQAPVLVIYGKNNRPSGIPDRFSGSSSGNTASLTITGAQAEDEADYYCMSRDHPGNQWVFGGGTKVTVLG

SEQ ID NO: 219 - DNA, 2154 bp, Artificial Sequence
  Description of Artificial Sequence: Synthetic polynucleotide
gaggtccagctcctccagtcaggtggaggactggtgcaacccggaggttcacttcggctgtcgtgtgcggcatcgggattcacgttttcggtgtatccgatgcattgggtgcgacaagctccgggcaaagggcttgaatgggtgtcgtccatctcgtcgtcgggaggagcaacgaggtatgccgattccgtaaagggtaggttcaccatctcacgcgacaattccaagaatacgttgtacctgcagatgaattcgcttagggcagaagatacggccgtgtactattgcgcaaaagatttctatgacattcttactggtaatgcgttcgatatctggggtcagggaactaccgtaacggtgtcgagcgctagcactaagggaccgtccgtgtttcccctcgcgcctagctcgaagagcacatcgggaggaacagcggcgctcggctgtctcgtcaaagactacttccccgagccggtgaccgtgagctggaattccggagcgttgacctcaggggtgcatacattccctgccgtactgcaatcatcagggctctactcattgtcgagcgtagtgactgtaccgtcgtcatcgctcggaacgcagacgtacatctgcaatgtcaatcacaagccctccaatactaaggtagataagaaagtagaaccgaagtcgtgtgataagacccatacatgccctccgtgccccgcaccggaactcttgggtggcccatcagtctttctgttcccgccaaagcccaaagacacactgatgatttcgcgcacgcccgaagtcacttgcgtcgtggtggatgtgtcgcatgaggacccggaggtcaagttcaactggtacgtcgatggtgtagaagtccacaacgccaagaccaagcctcgggaggagcagtataactccacctaccgggtagtgagcgtgcttacagtgctccatcaggactggctgaacggcaaagaatacaaatgcaaagtcagcaacaaagcgctgccagcgcccatcgagaaaacaattagcaaagcgaaagggcagcccagagaacctcaagtgtatacattgccgccgtcgcgggaggaaatgacaaagaatcaggtatccctgacgtgtcttgtgaaaggcttttacccatccgacattgcggtagagtgggagtcgaatgggcaacccgagaacaactataagacgactcccccagtcttggattcagacggatcctttttcttgtactcgaaactcacagtcgacaagtccagatggcagcaggggaacgtgttcagctgcagcgtgatgcacgaggcccttcacaaccactatacgcagaaatcattaagcttatcgccaggtaaaggaggtggcgggagcgggggagggggatccggtggcggagggtcggaagtgcagctggtggagagcggaggtgggcttgtccaaccgggcaggtcacttagattgtcatgtgcggcgagcggttttacctttgacgattatgcgatgcactgggtccgccaggcaccggggaaggggctcgaatgggtatcaggaatctcgtggaactcggggtccgtgggctatgcggactcggtcaaggggcgcttcacaatctcaagggacaatgccaaaaactcgctctacttgcagatgaactcattgcgagctgaggacacggcgctttactactgtgcgcgggatttgggctacaatcaatggttggaagggtttgattactgggggcagggaactctcgtgaccgtgtccagcgcatcgacgggaggaggaggttccgggggtgggggaagcgggggtggagggtcatcgtcagagctgacgcaagatcccgcggtatccgtcgcccttgggcagaccgtcaggattacgtgccagggagactcacttagaagctactacgcttcctggtatcagcaaaagccgggacaggcacccgtgttggtgatctacgggaagaataaccggcccagcgggattcctgaccgcttttcgggctcctcatcggggaacacagcctcgttgactatcacgggtgcgcaagccgaggacgaggcagactattactgtatgtcgcgagattcccctggtaatcagtgggtctttgggggaggaactaaggtaacggtattggggtgataa

SEQ ID NO: 220 - protein, 715 aa, Artificial Sequence
  Description of Artificial Sequence: Synthetic polypeptide
EVQLLQSGGGLVQPGGSLRLSCAASGFTFSVYPMHWVRQAPGKGLEWVSSISSSGGATRYADSVKGRFTISRDNSKNTLYLQMNSLRAEDTAVYYCAKDFYDILTGNAFDIWGQGTTVTVSSASTKGPSVFPLAPSSKSTSGGTAALGCLVKDYFPEPVTVSWNSGALTSGVHTFPAVLQSSGLYSLSSVVTVPSSSLGTQTYICNVNHKPSNTKVDKKVEPKSCDKTHTCPPCPAPELLGGPSVFLFPPKPKDTLMISRTPEVTCVVVDVSHEDPEVKFNWYVDGVEVHNAKTKPREEQYNSTYRVVSVLTVLHQDWLNGKEYKCKVSNKALPAPIEKTISKAKGQPREPQVYTLPPSREEMTKNQVSLTCLVKGFYPSDIAVEWESNGQPENNYKTTPPVLDSDGSFFLYSKLTVDKSRWQQGNVFSCSVMHEALHNHYTQKSLSLSPGGGGGSGGGGSGGGGSEVQLVESGGGLVQPGRSLRLSCAASGFTFDDYAMHWVRQAPGKGLEWVSGISWNSGSVGYADSVKGRFTISRDNAKNSLYLQMNSLRAEDTALYYCARDLGYNQWLEGFDYWGQGTLVTVSSASTGGGGSGGGGSGGGGSSSELTQDPAVSVALGQTVRITCQGDSLRSYYASWYQQKPGQAPVLVIYGKNNRPSGIPDRFSGSSSGNTASLTITGAQAEDEADYYCMSRDSPGNQWVFGGGTKVTVLG

SEQ ID NO: 221 - DNA, 2166 bp, Artificial Sequence
  Description of Artificial Sequence: Synthetic polynucleotide
gaagtccagctgctccaaagcggcggaggactcgtacagccgggagggagcttgaggctcagctgcgctgcgtccggtttcatgttctcaagatatcccatgcactgggtgcggcaggcaccaggaaagggactggagtgggtcggttcgatttcgggctccggtggggcaaccccttatgccgattccgtcaaagggcgctttaccatttcaagggataacagcaagaacactttgtacttgcaaatgaattcgcttcgagcggaggacacagccgtgtactactgtgcgaaagacttttaccagatcttgacaggtaatgccttcgactattgggggcaggggacaacggtaacggtgtcgtccgctagcacgaaggggcctagcgtctttccgctcgccccctcgtcaaaatcaacgtcgggtggaacggccgcattgggttgtctcgtaaaggactactttccggaacccgtcaccgtatcgtggaattcaggcgccctgacttccggggtccacacctttcccgctgtcttgcagtcctcgggtttgtattcactgtcgtcagtggtgacagtaccatcatcctcactgggaactcaaacgtacatctgcaacgtgaaccacaagccgagcaacactaaggtggataagaaggtagagcccaagtcatgcgacaaaacgcatacatgcccgccatgccccgcaccagaacttttgggaggtccgtcagtgtttctctttccgcctaagcccaaagacacactgatgatttcccggacgcccgaagtcacttgtgtggtcgtcgacgtgtcccatgaagatcccgaagtaaagttcaactggtatgtcgacggtgtggaagtccacaatgcaaaaaccaagcccagggaagaacagtacaacagcacatatcgagtggtgagcgtgttgaccgtgctgcaccaagactggctcaatggaaaggagtacaaatgcaaagtgtccaacaaggcactgcctgcgcccattgagaaaacgatttcgaaagcaaagggacagccaagagaaccccaagtgtatacccttcccccgtcgcgcgaggaaatgacgaagaaccaggtatcgttgacgtgtcttgtaaagggattctatccctcggacatcgcggtcgagtgggagtccaacggacagccagagaataactacaaaaccacaccgcctgtgctggattccgacgggtcgtttttcttgtattcgaagcttacggtagacaaaagccggtggcagcagggtaatgtgttcagctgctcagtaatgcacgaggctctccataatcattacactcagaagtccctttccctttcgccgggagggggtgggggatccggcggaggtgggtcgggaggtggaggatcacaagtgcaattggtacagtcgggaggcgggcttgtgcaacccggagggtcactgcgcctttcatgtgcggcgagcggtttcacgttcgatgattatgcgatgcattgggtacggcaggcacctggcaaagggttggagtgggtagccggaatctcgtggaatagcgggagcatcggttatgcggattccgtcaaagggaggtttacaatttcgagggacaatgcgaagaacagcctgtatctccaaatgaattcgctcaggcccgaagataccgccgtctactactgcgcgagggacttgggatacaaccagtgggtggaagggtttgattactgggggcaggggactctggtaactgtctcatcggcatcgactggtggtggcgggtccggagggggaggaagcggaggaggcgggagcggaggcggtgggtccagctacgaactgactcaagatccggccgtatcggtggccctcggacaaacagtgcgaatcacctgtcagggggatagccttagatcgtactacgcttcgtggtatcagcaaaagcccggacaggcaccagtgcttgtgatctacggaaagaacaatagaccgagcggaattccggatcggttttcgggttcgacttccggaaattcggcgtcgctcacgatcaccggagctcaggcagaggatgaagcggattactattgtaattcccgcgattcgtcggggaatcattgggtgttcggtgggggtacaaaggtaactgtactcggctgataa

SEQ ID NO: 222 - protein, 720 aa, Artificial Sequence
  Description of Artificial Sequence: Synthetic polypeptide
EVQLLQSGGGLVQPGGSLRLSCAASGFMFSRYPMHWVRQAPGKGLEWVGSISGSGGATPYADSVKGRFTISRDNSKNTLYLQMNSLRAEDTAVYYCAKDFYQILTGNAFDYWGQGTTVTVSSASTKGPSVFPLAPSSKSTSGGTAALGCLVKDYFPEPVTVSWNSGALTSGVHTFPAVLQSSGLYSLSSVVTVPSSSLGTQTYICNVNHKPSNTKVDKKVEPKSCDKTHTCPPCPAPELLGGPSVFLFPPKPKDTLMISRTPEVTCVVVDVSHEDPEVKFNWYVDGVEVHNAKTKPREEQYNSTYRVVSVLTVLHQDWLNGKEYKCKVSNKALPAPIEKTISKAKGQPREPQVYTLPPSREEMTKNQVSLTCLVKGFYPSDIAVEWESNGQPENNYKTTPPVLDSDGSFFLYSKLTVDKSRWQQGNVFSCSVMHEALHNHYTQKSLSLSPGGGGGSGGGGSGGGGSQVQLVQSGGGLVQPGGSLRLSCAASGFTFDDYAMHWVRQAPGKGLEWVAGISWNSGSIGYADSVKGRFTISRDNAKNSLYLQMNSLRPEDTAVYYCARDLGYNQWVEGFDYWGQGTLVTVSSASTGGGGSGGGGSGGGGSGGGGSSYELTQDPAVSVALGQTVRITCQGDSLRSYYASWYQQKPGQAPVLVIYGKNNRPSGIPDRFSGSTSGNSASLTITGAQAEDEADYYCNSRDSSGNHWVFGGGTKVTVLG

SEQ ID NO: 223 - DNA, 2154 bp, Artificial Sequence
  Description of Artificial Sequence: Synthetic polynucleotide
gaagtccagctgctccaaagcggcggaggactcgtacagccgggagggagcttgaggctcagctgcgctgcgtccggtttcatgttctcaagatatcccatgcactgggtgcggcaggcaccaggaaagggactggagtgggtcggttcgatttcgggctccggtggggcaaccccttatgccgattccgtcaaagggcgctttaccatttcaagggataacagcaagaacactttgtacttgcaaatgaattcgcttcgagcggaggacacagccgtgtactactgtgcgaaagacttttaccagatcttgacaggtaatgccttcgactattgggggcaggggacaacggtaacggtgtcgtccgctagcactaagggaccgtccgtgtttcccctcgcgcctagctcgaagagcacatcgggaggaacagcggcgctcggctgtctcgtcaaagactacttccccgagccggtgaccgtgagctggaattccggagcgttgacctcaggggtgcatacattccctgccgtactgcaatcatcagggctctactcattgtcgagcgtagtgactgtaccgtcgtcatcgctcggaacgcagacgtacatctgcaatgtcaatcacaagccctccaatactaaggtagataagaaagtagaaccgaagtcgtgtgataagacccatacatgccctccgtgccccgcaccggaactcttgggtggcccatcagtctttctgttcccgccaaagcccaaagacacactgatgatttcgcgcacgcccgaagtcacttgcgtcgtggtggatgtgtcgcatgaggacccggaggtcaagttcaactggtacgtcgatggtgtagaagtccacaacgccaagaccaagcctcgggaggagcagtataactccacctaccgggtagtgagcgtgcttacagtgctccatcaggactggctgaacggcaaagaatacaaatgcaaagtcagcaacaaagcgctgccagcgcccatcgagaaaacaattagcaaagcgaaagggcagcccagagaacctcaagtgtatacattgccgccgtcgcgggaggaaatgacaaagaatcaggtatccctgacgtgtcttgtgaaaggcttttacccatccgacattgcggtagagtgggagtcgaatgggcaacccgagaacaactataagacgactcccccagtcttggattcagacggatcctttttcttgtactcgaaactcacagtcgacaagtccagatggcagcaggggaacgtgttcagctgcagcgtgatgcacgaggcccttcacaaccactatacgcagaaatcattaagcttatcgccaggtaaaggaggtggcgggagcgggggagggggatccggtggcggagggtcggaagtgcagctggtggagagcggaggtgggcttgtccaaccgggcaggtcacttagattgtcatgtgcggcgagcggttttacctttgacgattatgcgatgcactgggtccgccaggcaccggggaaggggctcgaatgggtatcaggaatctcgtgggactcggggtccacgggctatgcggactcggtcaaggggcgcttcacaatctcaagggacaatgccaaaaactcgctctatcttcagatgaactcattgcgagctgaggacacggcgctttactactgtgcgcgggatttgggtgcctatcaatgggtagaagggtttgattactgggggcagggaactctcgtgaccgtgtccagcgcatcgacgggaggaggaggttccgggggtgggggaagcgggggtggagggtcatcgtcagagctgacgcaagatcccgcggtatccgtcgcccttgggcagaccgtcaggattacgtgccagggagactcacttagaagctactacgcttcctggtatcagcaaaagccgggacaggcacccgtgttggtgatctacgggaagaataaccggcccagcgggattcctgaccgcttttcgggctcctcatcggggaacacagcctcgttgactatcacgggtgcgcaagccgaggacgaggcagactattactgtgaatcgcgagattcccctggtaatcagtgggtctttgggggaggaactaaggtaacggtattggggtgataa

SEQ ID NO: 224 - protein, 715 aa, Artificial Sequence
  Description of Artificial Sequence: Synthetic polypeptide
EVQLLQSGGGLVQPGGSLRLSCAASGFMFSRYPMHWVRQAPGKGLEWVGSISGSGGATPYADSVKGRFTISRDNSKNTLYLQMNSLRAEDTAVYYCAKDFYQILTGNAFDYWGQGTTVTVSSASTKGPSVFPLAPSSKSTSGGTAALGCLVKDYFPEPVTVSWNSGALTSGVHTFPAVLQSSGLYSLSSVVTVPSSSLGTQTYICNVNHKPSNTKVDKKVEPKSCDKTHTCPPCPAPELLGGPSVFLFPPKPKDTLMISRTPEVTCVVVDVSHEDPEVKFNWYVDGVEVHNAKTKPREEQYNSTYRVVSVLTVLHQDWLNGKEYKCKVSNKALPAPIEKTISKAKGQPREPQVYTLPPSREEMTKNQVSLTCLVKGFYPSDIAVEWESNGQPENNYKTTPPVLDSDGSFFLYSKLTVDKSRWQQGNVFSCSVMHEALHNHYTQKSLSLSPGGGGGSGGGGSGGGGSEVQLVESGGGLVQPGRSLRLSCAASGFTFDDYAMHWVRQAPGKGLEWVSGISWDSGSTGYADSVKGRFTISRDNAKNSLYLQMNSLRAEDTALYYCARDLGAYQWVEGFDYWGQGTLVTVSSASTGGGGSGGGGSGGGGSSSELTQDPAVSVALGQTVRITCQGDSLRSYYASWYQQKPGQAPVLVIYGKNNRPSGIPDRFSGSSSGNTASLTITGAQAEDEADYYCESRDSPGNQWVFGGGTKVTVLG

SEQ ID NO: 225 - DNA, 2169 bp, Artificial Sequence
  Description of Artificial Sequence: Synthetic polynucleotide
gaagtccagctgctccaaagcggcggaggactcgtacagccgggagggagcttgaggctcagctgcgctgcgtccggtttcatgttctcaagatatcccatgcactgggtgcggcaggcaccaggaaagggactggagtgggtcggttcgatttcgggctccggtggggcaaccccttatgccgattccgtcaaagggcgctttaccatttcaagggataacagcaagaacactttgtacttgcaaatgaattcgcttcgagcggaggacacagccgtgtactactgtgcgaaagacttttaccagatcttgacaggtaatgccttcgactattgggggcaggggacaacggtaacggtgtcgtccgctagcactaagggaccgtccgtgtttcccctcgcgcctagctcgaagagcacatcgggaggaacagcggcgctcggctgtctcgtcaaagactacttccccgagccggtgaccgtgagctggaattccggagcgttgacctcaggggtgcatacattccctgccgtactgcaatcatcagggctctactcattgtcgagcgtagtgactgtaccgtcgtcatcgctcggaacgcagacgtacatctgcaatgtcaatcacaagccctccaatactaaggtagataagaaagtagaaccgaagtcgtgtgataagacccatacatgccctccgtgccccgcaccggaactcttgggtggcccatcagtctttctgttcccgccaaagcccaaagacacactgatgatttcgcgcacgcccgaagtcacttgcgtcgtggtggatgtgtcgcatgaggacccggaggtcaagttcaactggtacgtcgatggtgtagaagtccacaacgccaagaccaagcctcgggaggagcagtataactccacctaccgggtagtgagcgtgcttacagtgctccatcaggactggctgaacggcaaagaatacaaatgcaaagtcagcaacaaagcgctgccagcgcccatcgagaaaacaattagcaaagcgaaagggcagcccagagaacctcaagtgtatacattgccgccgtcgcgggaggaaatgacaaagaatcaggtatccctgacgtgtcttgtgaaaggcttttacccatccgacattgcggtagagtgggagtcgaatgggcaacccgagaacaactataagacgactcccccagtcttggattcagacggatcctttttcttgtactcgaaactcacagtcgacaagtccagatggcagcaggggaacgtgttcagctgcagcgtgatgcacgaggcccttcacaaccactatacgcagaaatcattaagcttatcgccaggtaaaggaggtggcgggagcgggggagggggatccggtggcggagggtcgcaagtgcagctggtgcaaagcggaggtgggcttgtccaacccggaggctcacttagattgtcatgtgcggcgagcggttttacctttgacgattatgcgatgcactgggtccgccaggcaccggggaaggggctcgaatgggtagccggaatctcgtgggactcggggtccacgggctatgcggactcggtcaaggggcgcttcacaatctcaagggacaatgccaaaaactcgctctatctgcagatgaactcattgcgagctgaggacacggcgctttactactgtgcgcgggatttgggtgcctatcaatgggtagaagggtttgattactgggggcagggaactctcgtgaccgtgtccagcgcatcgacgggaggaggaggttccgggggtgggggaagcgggggtggagggtcaggaggtgggggatcgtcatacgagctgacgcaagatcccgcggtatccgtcgcccttgggcagaccgtcaggattacgtgccagggagactcacttagaagctactacgcttcctggtatcagcaaaagccgggacaggcacccgtgttggtgatctacgggaagaataaccggcccagcgggattcctgaccgcttttcgggctccacctcagggaactcggcctcgttgactatcacgggtgcgcaagccgaggacgaggcagactattactgtaactcgcgagattcccctggtaatcagtgggtctttgggggaggaactaaggtaacggtattggggtgataa

SEQ ID NO: 226 - protein, 720 aa, Artificial Sequence
  Description of Artificial Sequence: Synthetic polypeptide
EVQLLQSGGGLVQPGGSLRLSCAASGFMFSRYPMHWVRQAPGKGLEWVGSISGSGGATPYADSVKGRFTISRDNSKNTLYLQMNSLRAEDTAVYYCAKDFYQILTGNAFDYWGQGTTVTVSSASTKGPSVFPLAPSSKSTSGGTAALGCLVKDYFPEPVTVSWNSGALTSGVHTFPAVLQSSGLYSLSSVVTVPSSSLGTQTYICNVNHKPSNTKVDKKVEPKSCDKTHTCPPCPAPELLGGPSVFLFPPKPKDTLMISRTPEVTCVVVDVSHEDPEVKFNWYVDGVEVHNAKTKPREEQYNSTYRVVSVLTVLHQDWLNGKEYKCKVSNKALPAPIEKTISKAKGQPREPQVYTLPPSREEMTKNQVSLTCLVKGFYPSDIAVEWESNGQPENNYKTTPPVLDSDGSFFLYSKLTVDKSRWQQGNVFSCSVMHEALHNHYTQKSLSLSPGGGGGSGGGGSGGGGSQVQLVQSGGGLVQPGGSLRLSCAASGFTFDDYAMHWVRQAPGKGLEWVAGISWDSGSTGYADSVKGRFTISRDNAKNSLYLQMNSLRAEDTALYYCARDLGAYQWVEGFDYWGQGTLVTVSSASTGGGGSGGGGSGGGGSGGGGSSYELTQDPAVSVALGQTVRITCQGDSLRSYYASWYQQKPGQAPVLVIYGKNNRPSGIPDRFSGSTSGNSASLTITGAQAEDEADYYCNSRDSPGNQWVFGGGTKVTVLG

SEQ ID NO: 227 - DNA, 2154 bp, Artificial Sequence
  Description of Artificial Sequence: Synthetic polynucleotide
gaagtccagctgctccaaagcggcggaggactcgtacagccgggagggagcttgaggctcagctgcgctgcgtccggtttcatgttctcaagatatcccatgcactgggtgcggcaggcaccaggaaagggactggagtgggtcggttcgatttcgggctccggtggggcaaccccttatgccgattccgtcaaagggcgctttaccatttcaagggataacagcaagaacactttgtacttgcaaatgaattcgcttcgagcggaggacacagccgtgtactactgtgcgaaagacttttaccagatcttgacaggtaatgccttcgactattgggggcaggggacaacggtaacggtgtcgtccgctagcactaagggaccgtccgtgtttcccctcgcgcctagctcgaagagcacatcgggaggaacagcggcgctcggctgtctcgtcaaagactacttccccgagccggtgaccgtgagctggaattccggagcgttgacctcaggggtgcatacattccctgccgtactgcaatcatcagggctctactcattgtcgagcgtagtgactgtaccgtcgtcatcgctcggaacgcagacgtacatctgcaatgtcaatcacaagccctccaatactaaggtagataagaaagtagaaccgaagtcgtgtgataagacccatacatgccctccgtgccccgcaccggaactcttgggtggcccatcagtctttctgttcccgccaaagcccaaagacacactgatgatttcgcgcacgcccgaagtcacttgcgtcgtggtggatgtgtcgcatgaggacccggaggtcaagttcaactggtacgtcgatggtgtagaagtccacaacgccaagaccaagcctcgggaggagcagtataactccacctaccgggtagtgagcgtgcttacagtgctccatcaggactggctgaacggcaaagaatacaaatgcaaagtcagcaacaaagcgctgccagcgcccatcgagaaaacaattagcaaagcgaaagggcagcccagagaacctcaagtgtatacattgccgccgtcgcgggaggaaatgacaaagaatcaggtatccctgacgtgtcttgtgaaaggcttttacccatccgacattgcggtagagtgggagtcgaatgggcaacccgagaacaactataagacgactcccccagtcttggattcagacggatcctttttcttgtactcgaaactcacagtcgacaagtccagatggcagcaggggaacgtgttcagctgcagcgtgatgcacgaggcccttcacaaccactatacgcagaaatcattaagcttatcgccaggtaaaggaggtggcgggagcgggggagggggatccggtggcggagggtcggaagtgcagctggtggagagcggaggtgggcttgtccaaccgggcaggtcacttagattgtcatgtgcggcgagcggttttacctttgacgattatgcgatgcactgggtccgccaggcaccggggaaggggctcgaatgggtatcaggaatctcgtggaattcggggtccacgggctatgcggactcggtcaaggggcgcttcacaatctcaagggacaatgccaaaaactcgctctatttgcaaatgaactcattgcgagctgaggacacggcgctttactactgtgcgcgggatttgggctttaaccaatgggtagacgggtttgattactgggggcagggaactctcgtgaccgtgtccagcgcatcgacgggaggaggaggttccgggggtgggggaagcgggggtggagggtcatcgtcagagctgacgcaagatcccgcggtatccgtcgcccttgggcagaccgtcaggattacgtgccagggagactcacttagaagctactacgcttcctggtatcagcaaaagccgggacaggcacccgtgttggtgatctacgggaagaataaccggcccagcgggattcctgaccgcttttcgggctcctcatcggggaacacagcctcgttgactatcacgggtgcgcaagccgaggacgaggcagactattactgtaactcgcgagatacgcctggtgaccagtgggtctttgggggaggaactaaggtaacggtattggggtgataa

SEQ ID NO: 228 - protein, 715 aa, Artificial Sequence
  Description of Artificial Sequence: Synthetic polypeptide
EVQLLQSGGGLVQPGGSLRLSCAASGFMFSRYPMHWVRQAPGKGLEWVGSISGSGGATPYADSVKGRFTISRDNSKNTLYLQMNSLRAEDTAVYYCAKDFYQILTGNAFDYWGQGTTVTVSSASTKGPSVFPLAPSSKSTSGGTAALGCLVKDYFPEPVTVSWNSGALTSGVHTFPAVLQSSGLYSLSSVVTVPSSSLGTQTYICNVNHKPSNTKVDKKVEPKSCDKTHTCPPCPAPELLGGPSVFLFPPKPKDTLMISRTPEVTCVVVDVSHEDPEVKFNWYVDGVEVHNAKTKPREEQYNSTYRVVSVLTVLHQDWLNGKEYKCKVSNKALPAPIEKTISKAKGQPREPQVYTLPPSREEMTKNQVSLTCLVKGFYPSDIAVEWESNGQPENNYKTTPPVLDSDGSFFLYSKLTVDKSRWQQGNVFSCSVMHEALHNHYTQKSLSLSPGGGGGSGGGGSGGGGSEVQLVESGGGLVQPGRSLRLSCAASGFTFDDYAMHWVRQAPGKGLEWVSGISWNSGSTGYADSVKGRFTISRDNAKNSLYLQMNSLRAEDTALYYCARDLGFNQWVDGFDYWGQGTLVTVSSASTGGGGSGGGGSGGGGSSSELTQDPAVSVALGQTVRITCQGDSLRSYYASWYQQKPGQAPVLVIYGKNNRPSGIPDRFSGSSSGNTASLTITGAQAEDEADYYCNSRDTPGDQWVFGGGTKVTVLG

SEQ ID NO: 229 - DNA, 2154 bp, Artificial Sequence
  Description of Artificial Sequence: Synthetic polynucleotide
gaagtccagctgctccaaagcggcggaggactcgtacagccgggagggagcttgaggctcagctgcgctgcgtccggtttcatgttctcaagatatcccatgcactgggtgcggcaggcaccaggaaagggactggagtgggtcggttcgatttcgggctccggtggggcaaccccttatgccgattccgtcaaagggcgctttaccatttcaagggataacagcaagaacactttgtacttgcaaatgaattcgcttcgagcggaggacacagccgtgtactactgtgcgaaagacttttaccagatcttgacaggtaatgccttcgactattgggggcaggggacaacggtaacggtgtcgtccgctagcactaagggaccgtccgtgtttcccctcgcgcctagctcgaagagcacatcgggaggaacagcggcgctcggctgtctcgtcaaagactacttccccgagccggtgaccgtgagctggaattccggagcgttgacctcaggggtgcatacattccctgccgtactgcaatcatcagggctctactcattgtcgagcgtagtgactgtaccgtcgtcatcgctcggaacgcagacgtacatctgcaatgtcaatcacaagccctccaatactaaggtagataagaaagtagaaccgaagtcgtgtgataagacccatacatgccctccgtgccccgcaccggaactcttgggtggcccatcagtctttctgttcccgccaaagcccaaagacacactgatgatttcgcgcacgcccgaagtcacttgcgtcgtggtggatgtgtcgcatgaggacccggaggtcaagttcaactggtacgtcgatggtgtagaagtccacaacgccaagaccaagcctcgggaggagcagtataactccacctaccgggtagtgagcgtgcttacagtgctccatcaggactggctgaacggcaaagaatacaaatgcaaagtcagcaacaaagcgctgccagcgcccatcgagaaaacaattagcaaagcgaaagggcagcccagagaacctcaagtgtatacattgccgccgtcgcgggaggaaatgacaaagaatcaggtatccctgacgtgtcttgtgaaaggcttttacccatccgacattgcggtagagtgggagtcgaatgggcaacccgagaacaactataagacgactcccccagtcttggattcagacggatcctttttcttgtactcgaaactcacagtcgacaagtccagatggcagcaggggaacgtgttcagctgcagcgtgatgcacgaggcccttcacaaccactatacgcagaaatcattaagcttatcgccaggtaaaggaggtggcgggagcgggggagggggatccggtggcggagggtcggaagtgcagctggtggagagcggaggtgggcttgtccaaccgggcaggtcacttagattgtcatgtgcggcgagcggttttacctttgacgattatgcgatgcactgggtccgccaggcaccggggaaggggctcgaatgggtatcaggaatctcgtggaactcggggtccacgggctatgcggactcggtcaaggggcgcttcacaatctcaagggacaatgccaaaaactcgctctatctccagatgaactcattgcgagctgaggacacggcgctttactactgtgcgcgggatttgggttacaaccaatggcttgaagggtttgattactgggggcagggaactctcgtgaccgtgtccagcgcatcgacgggaggaggaggttccgggggtgggggaagcgggggtggagggtcatcgtcagagctgacgcaagatcccgcggtatccgtcgcccttgggcagaccgtcaggattacgtgccagggagactcacttagaagctactacgcttcctggtatcagcaaaagccgggacaggcacccgtgttggtgatctacgggaagaataaccggcccagcgggattcctgaccgcttttcgggctcctcatcggggaacacagcctcgttgactatcacgggtgcgcaagccgaggacgaggcagactattactgtatgtcgcgagatcaccctggtaatcagtgggtctttgggggaggaactaaggtaacggtattggggtgataa

SEQ ID NO: 230 - protein, 715 aa, Artificial Sequence
  Description of Artificial Sequence: Synthetic polypeptide
EVQLLQSGGGLVQPGGSLRLSCAASGFMFSRYPMHWVRQAPGKGLEWVGSISGSGGATPYADSVKGRFTISRDNSKNTLYLQMNSLRAEDTAVYYCAKDFYQILTGNAFDYWGQGTTVTVSSASTKGPSVFPLAPSSKSTSGGTAALGCLVKDYFPEPVTVSWNSGALTSGVHTFPAVLQSSGLYSLSSVVTVPSSSLGTQTYICNVNHKPSNTKVDKKVEPKSCDKTHTCPPCPAPELLGGPSVFLFPPKPKDTLMISRTPEVTCVVVDVSHEDPEVKFNWYVDGVEVHNAKTKPREEQYNSTYRVVSVLTVLHQDWLNGKEYKCKVSNKALPAPIEKTISKAKGQPREPQVYTLPPSREEMTKNQVSLTCLVKGFYPSDIAVEWESNGQPENNYKTTPPVLDSDGSFFLYSKLTVDKSRWQQGNVFSCSVMHEALHNHYTQKSLSLSPGGGGGSGGGGSGGGGSEVQLVESGGGLVQPGRSLRLSCAASGFTFDDYAMHWVRQAPGKGLEWVSGISWNSGSTGYADSVKGRFTISRDNAKNSLYLQMNSLRAEDTALYYCARDLGYNQWLEGFDYWGQGTLVTVSSASTGGGGSGGGGSGGGGSSSELTQDPAVSVALGQTVRITCQGDSLRSYYASWYQQKPGQAPVLVIYGKNNRPSGIPDRFSGSSSGNTASLTITGAQAEDEADYYCMSRDHPGNQWVFGGGTKVTVLG

SEQ ID NO: 231 - DNA, 2154 bp, Artificial Sequence
  Description of Artificial Sequence: Synthetic polynucleotide
gaagtccagctgctccaaagcggcggaggactcgtacagccgggagggagcttgaggctcagctgcgctgcgtccggtttcatgttctcaagatatcccatgcactgggtgcggcaggcaccaggaaagggactggagtgggtcggttcgatttcgggctccggtggggcaaccccttatgccgattccgtcaaagggcgctttaccatttcaagggataacagcaagaacactttgtacttgcaaatgaattcgcttcgagcggaggacacagccgtgtactactgtgcgaaagacttttaccagatcttgacaggtaatgccttcgactattgggggcaggggacaacggtaacggtgtcgtccgctagcactaagggaccgtccgtgtttcccctcgcgcctagctcgaagagcacatcgggaggaacagcggcgctcggctgtctcgtcaaagactacttccccgagccggtgaccgtgagctggaattccggagcgttgacctcaggggtgcatacattccctgccgtactgcaatcatcagggctctactcattgtcgagcgtagtgactgtaccgtcgtcatcgctcggaacgcagacgtacatctgcaatgtcaatcacaagccctccaatactaaggtagataagaaagtagaaccgaagtcgtgtgataagacccatacatgccctccgtgccccgcaccggaactcttgggtggcccatcagtctttctgttcccgccaaagcccaaagacacactgatgatttcgcgcacgcccgaagtcacttgcgtcgtggtggatgtgtcgcatgaggacccggaggtcaagttcaactggtacgtcgatggtgtagaagtccacaacgccaagaccaagcctcgggaggagcagtataactccacctaccgggtagtgagcgtgcttacagtgctccatcaggactggctgaacggcaaagaatacaaatgcaaagtcagcaacaaagcgctgccagcgcccatcgagaaaacaattagcaaagcgaaagggcagcccagagaacctcaagtgtatacattgccgccgtcgcgggaggaaatgacaaagaatcaggtatccctgacgtgtcttgtgaaaggcttttacccatccgacattgcggtagagtgggagtcgaatgggcaacccgagaacaactataagacgactcccccagtcttggattcagacggatcctttttcttgtactcgaaactcacagtcgacaagtccagatggcagcaggggaacgtgttcagctgcagcgtgatgcacgaggcccttcacaaccactatacgcagaaatcattaagcttatcgccaggtaaaggaggtggcgggagcgggggagggggatccggtggcggagggtcggaagtgcagctggtggagagcggaggtgggcttgtccaaccgggcaggtcacttagattgtcatgtgcggcgagcggttttacctttgacgattatgcgatgcactgggtccgccaggcaccggggaaggggctcgaatgggtatcaggaatctcgtggaactcggggtccgtgggctatgcggactcggtcaaggggcgcttcacaatctcaagggacaatgccaaaaactcgctctacttgcagatgaactcattgcgagctgaggacacggcgctttactactgtgcgcgggatttgggctacaatcaatggttggaagggtttgattactgggggcagggaactctcgtgaccgtgtccagcgcatcgacgggaggaggaggttccgggggtgggggaagcgggggtggagggtcatcgtcagagctgacgcaagatcccgcggtatccgtcgcccttgggcagaccgtcaggattacgtgccagggagactcacttagaagctactacgcttcctggtatcagcaaaagccgggacaggcacccgtgttggtgatctacgggaagaataaccggcccagcgggattcctgaccgcttttcgggctcctcatcggggaacacagcctcgttgactatcacgggtgcgcaagccgaggacgaggcagactattactgtatgtcgcgagattcccctggtaatcagtgggtctttgggggaggaactaaggtaacggtattggggtgataa

SEQ ID NO: 232 - protein, 715 aa, Artificial Sequence
  Description of Artificial Sequence: Synthetic polypeptide
EVQLLQSGGGLVQPGGSLRLSCAASGFMFSRYPMHWVRQAPGKGLEWVGSISGSGGATPYADSVKGRFTISRDNSKNTLYLQMNSLRAEDTAVYYCAKDFYQILTGNAFDYWGQGTTVTVSSASTKGPSVFPLAPSSKSTSGGTAALGCLVKDYFPEPVTVSWNSGALTSGVHTFPAVLQSSGLYSLSSVVTVPSSSLGTQTYICNVNHKPSNTKVDKKVEPKSCDKTHTCPPCPAPELLGGPSVFLFPPKPKDTLMISRTPEVTCVVVDVSHEDPEVKFNWYVDGVEVHNAKTKPREEQYNSTYRVVSVLTVLHQDWLNGKEYKCKVSNKALPAPIEKTISKAKGQPREPQVYTLPPSREEMTKNQVSLTCLVKGFYPSDIAVEWESNGQPENNYKTTPPVLDSDGSFFLYSKLTVDKSRWQQGNVFSCSVMHEALHNHYTQKSLSLSPGGGGGSGGGGSGGGGSEVQLVESGGGLVQPGRSLRLSCAASGFTFDDYAMHWVRQAPGKGLEWVSGISWNSGSVGYADSVKGRFTISRDNAKNSLYLQMNSLRAEDTALYYCARDLGYNQWLEGFDYWGQGTLVTVSSASTGGGGSGGGGSGGGGSSSELTQDPAVSVALGQTVRITCQGDSLRSYYASWYQQKPGQAPVLVIYGKNNRPSGIPDRFSGSSSGNTASLTITGAQAEDEADYYCMSRDSPGNQWVFGGGTKVTVLG

SEQ ID NO: 233 - DNA, 2166 bp, Artificial Sequence
  Description of Artificial Sequence: Synthetic polynucleotide
gaagtacagcttttgcaaagcgggggtggcttggtccagcccggagggtccttgaggctctcgtgtgcggcctcagggttcgacttttcgtcgtatcccatgcactgggtccgccaggcccctggtaaagggctggagtgggtaggatccattagctcctcgggaggggcaactccgtatgcggattcagtgaaaggccgattcacaatctcgcgggataactcgaagaacaccctgtaccttcaaatgaattcactcagaccagaggacacggcagtctactattgcgctaaggacttttacactatcttgacgggaaatgcgtttgatatgtggggacagggaacctcagtgacggtcagctcagctagcacgaaggggcctagcgtctttccgctcgccccctcgtcaaaatcaacgtcgggtggaacggccgcattgggttgtctcgtaaaggactactttccggaacccgtcaccgtatcgtggaattcaggcgccctgacttccggggtccacacctttcccgctgtcttgcagtcctcgggtttgtattcactgtcgtcagtggtgacagtaccatcatcctcactgggaactcaaacgtacatctgcaacgtgaaccacaagccgagcaacactaaggtggataagaaggtagagcccaagtcatgcgacaaaacgcatacatgcccgccatgccccgcaccagaacttttgggaggtccgtcagtgtttctctttccgcctaagcccaaagacacactgatgatttcccggacgcccgaagtcacttgtgtggtcgtcgacgtgtcccatgaagatcccgaagtaaagttcaactggtatgtcgacggtgtggaagtccacaatgcaaaaaccaagcccagggaagaacagtacaacagcacatatcgagtggtgagcgtgttgaccgtgctgcaccaagactggctcaatggaaaggagtacaaatgcaaagtgtccaacaaggcactgcctgcgcccattgagaaaacgatttcgaaagcaaagggacagccaagagaaccccaagtgtatacccttcccccgtcgcgcgaggaaatgacgaagaaccaggtatcgttgacgtgtcttgtaaagggattctatccctcggacatcgcggtcgagtgggagtccaacggacagccagagaataactacaaaaccacaccgcctgtgctggattccgacgggtcgtttttcttgtattcgaagcttacggtagacaaaagccggtggcagcagggtaatgtgttcagctgctcagtaatgcacgaggctctccataatcattacactcagaagtccctttccctttcgccgggagggggtgggggatccggcggaggtgggtcgggaggtggaggatcacaagtgcaattggtacagtcgggaggcgggcttgtgcaacccggagggtcactgcgcctttcatgtgcggcgagcggtttcacgttcgatgattatgcgatgcattgggtacggcaggcacctggcaaagggttggagtgggtagccggaatctcgtggaatagcgggagcatcggttatgcggattccgtcaaagggaggtttacaatttcgagggacaatgcgaagaacagcctgtatctccaaatgaattcgctcaggcccgaagataccgccgtctactactgcgcgagggacttgggatacaaccagtgggtggaagggtttgattactgggggcaggggactctggtaactgtctcatcggcatcgactggtggtggcgggtccggagggggaggaagcggaggaggcgggagcggaggcggtgggtccagctacgaactgactcaagatccggccgtatcggtggccctcggacaaacagtgcgaatcacctgtcagggggatagccttagatcgtactacgcttcgtggtatcagcaaaagcccggacaggcaccagtgcttgtgatctacggaaagaacaatagaccgagcggaattccggatcggttttcgggttcgacttccggaaattcggcgtcgctcacgatcaccggagctcaggcagaggatgaagcggattactattgtaattcccgcgattcgtcggggaatcattgggtgttcggtgggggtacaaaggtaactgtactcggctgataa

SEQ ID NO: 234 - protein, 720 aa, Artificial Sequence
  Description of Artificial Sequence: Synthetic polypeptide
EVQLLQSGGGLVQPGGSLRLSCAASGFDFSSYPMHWVRQAPGKGLEWVGSISSSGGATPYADSVKGRFTISRDNSKNTLYLQMNSLRPEDTAVYYCAKDFYTILTGNAFDMWGQGTSVTVSSASTKGPSVFPLAPSSKSTSGGTAALGCLVKDYFPEPVTVSWNSGALTSGVHTFPAVLQSSGLYSLSSVVTVPSSSLGTQTYICNVNHKPSNTKVDKKVEPKSCDKTHTCPPCPAPELLGGPSVFLFPPKPKDTLMISRTPEVTCVVVDVSHEDPEVKFNWYVDGVEVHNAKTKPREEQYNSTYRVVSVLTVLHQDWLNGKEYKCKVSNKALPAPIEKTISKAKGQPREPQVYTLPPSREEMTKNQVSLTCLVKGFYPSDIAVEWESNGQPENNYKTTPPVLDSDGSFFLYSKLTVDKSRWQQGNVFSCSVMHEALHNHYTQKSLSLSPGGGGGSGGGGSGGGGSQVQLVQSGGGLVQPGGSLRLSCAASGFTFDDYAMHWVRQAPGKGLEWVAGISWNSGSIGYADSVKGRFTISRDNAKNSLYLQMNSLRPEDTAVYYCARDLGYNQWVEGFDYWGQGTLVTVSSASTGGGGSGGGGSGGGGSGGGGSSYELTQDPAVSVALGQTVRITCQGDSLRSYYASWYQQKPGQAPVLVIYGKNNRPSGIPDRFSGSTSGNSASLTITGAQAEDEADYYCNSRDSSGNHWVFGGGTKVTVLG

SEQ ID NO: 235 - DNA, 2154 bp, Artificial Sequence
  Description of Artificial Sequence: Synthetic polynucleotide
gaagtacagcttttgcaaagcgggggtggcttggtccagcccggagggtccttgaggctctcgtgtgcggcctcagggttcgacttttcgtcgtatcccatgcactgggtccgccaggcccctggtaaagggctggagtgggtaggatccattagctcctcgggaggggcaactccgtatgcggattcagtgaaaggccgattcacaatctcgcgggataactcgaagaacaccctgtaccttcaaatgaattcactcagaccagaggacacggcagtctactattgcgctaaggacttttacactatcttgacgggaaatgcgtttgatatgtggggacagggaacctcagtgacggtcagctcagctagcactaagggaccgtccgtgtttcccctcgcgcctagctcgaagagcacatcgggaggaacagcggcgctcggctgtctcgtcaaagactacttccccgagccggtgaccgtgagctggaattccggagcgttgacctcaggggtgcatacattccctgccgtactgcaatcatcagggctctactcattgtcgagcgtagtgactgtaccgtcgtcatcgctcggaacgcagacgtacatctgcaatgtcaatcacaagccctccaatactaaggtagataagaaagtagaaccgaagtcgtgtgataagacccatacatgccctccgtgccccgcaccggaactcttgggtggcccatcagtctttctgttcccgccaaagcccaaagacacactgatgatttcgcgcacgcccgaagtcacttgcgtcgtggtggatgtgtcgcatgaggacccggaggtcaagttcaactggtacgtcgatggtgtagaagtccacaacgccaagaccaagcctcgggaggagcagtataactccacctaccgggtagtgagcgtgcttacagtgctccatcaggactggctgaacggcaaagaatacaaatgcaaagtcagcaacaaagcgctgccagcgcccatcgagaaaacaattagcaaagcgaaagggcagcccagagaacctcaagtgtatacattgccgccgtcgcgggaggaaatgacaaagaatcaggtatccctgacgtgtcttgtgaaaggcttttacccatccgacattgcggtagagtgggagtcgaatgggcaacccgagaacaactataagacgactcccccagtcttggattcagacggatcctttttcttgtactcgaaactcacagtcgacaagtccagatggcagcaggggaacgtgttcagctgcagcgtgatgcacgaggcccttcacaaccactatacgcagaaatcattaagcttatcgccaggtaaaggaggtggcgggagcgggggagggggatccggtggcggagggtcggaagtgcagctggtggagagcggaggtgggcttgtccaaccgggcaggtcacttagattgtcatgtgcggcgagcggttttacctttgacgattatgcgatgcactgggtccgccaggcaccggggaaggggctcgaatgggtatcaggaatctcgtgggactcggggtccacgggctatgcggactcggtcaaggggcgcttcacaatctcaagggacaatgccaaaaactcgctctatcttcagatgaactcattgcgagctgaggacacggcgctttactactgtgcgcgggatttgggtgcctatcaatgggtagaagggtttgattactgggggcagggaactctcgtgaccgtgtccagcgcatcgacgggaggaggaggttccgggggtgggggaagcgggggtggagggtcatcgtcagagctgacgcaagatcccgcggtatccgtcgcccttgggcagaccgtcaggattacgtgccagggagactcacttagaagctactacgcttcctggtatcagcaaaagccgggacaggcacccgtgttggtgatctacgggaagaataaccggcccagcgggattcctgaccgcttttcgggctcctcatcggggaacacagcctcgttgactatcacgggtgcgcaagccgaggacgaggcagactattactgtgaatcgcgagattcccctggtaatcagtgggtctttgggggaggaactaaggtaacggtattggggtgataa

SEQ ID NO: 236 - protein, 715 aa, Artificial Sequence
  Description of Artificial Sequence: Synthetic polypeptide
EVQLLQSGGGLVQPGGSLRLSCAASGFDFSSYPMHWVRQAPGKGLEWVGSISSSGGATPYADSVKGRFTISRDNSKNTLYLQMNSLRPEDTAVYYCAKDFYTILTGNAFDMWGQGTSVTVSSASTKGPSVFPLAPSSKSTSGGTAALGCLVKDYFPEPVTVSWNSGALTSGVHTFPAVLQSSGLYSLSSVVTVPSSSLGTQTYICNVNHKPSNTKVDKKVEPKSCDKTHTCPPCPAPELLGGPSVFLFPPKPKDTLMISRTPEVTCVVVDVSHEDPEVKFNWYVDGVEVHNAKTKPREEQYNSTYRVVSVLTVLHQDWLNGKEYKCKVSNKALPAPIEKTISKAKGQPREPQVYTLPPSREEMTKNQVSLTCLVKGFYPSDIAVEWESNGQPENNYKTTPPVLDSDGSFFLYSKLTVDKSRWQQGNVFSCSVMHEALHNHYTQKSLSLSPGGGGGSGGGGSGGGGSEVQLVESGGGLVQPGRSLRLSCAASGFTFDDYAMHWVRQAPGKGLEWVSGISWDSGSTGYADSVKGRFTISRDNAKNSLYLQMNSLRAEDTALYYCARDLGAYQWVEGFDYWGQGTLVTVSSASTGGGGSGGGGSGGGGSSSELTQDPAVSVALGQTVRITCQGDSLRSYYASWYQQKPGQAPVLVIYGKNNRPSGIPDRFSGSSSGNTASLTITGAQAEDEADYYCESRDSPGNQWVFGGGTKVTVLG

SEQ ID NO: 237 - DNA, 2169 bp, Artificial Sequence
  Description of Artificial Sequence: Synthetic polynucleotide
gaagtacagcttttgcaaagcgggggtggcttggtccagcccggagggtccttgaggctctcgtgtgcggcctcagggttcgacttttcgtcgtatcccatgcactgggtccgccaggcccctggtaaagggctggagtgggtaggatccattagctcctcgggaggggcaactccgtatgcggattcagtgaaaggccgattcacaatctcgcgggataactcgaagaacaccctgtaccttcaaatgaattcactcagaccagaggacacggcagtctactattgcgctaaggacttttacactatcttgacgggaaatgcgtttgatatgtggggacagggaacctcagtgacggtcagctcagctagcactaagggaccgtccgtgtttcccctcgcgcctagctcgaagagcacatcgggaggaacagcggcgctcggctgtctcgtcaaagactacttccccgagccggtgaccgtgagctggaattccggagcgttgacctcaggggtgcatacattccctgccgtactgcaatcatcagggctctactcattgtcgagcgtagtgactgtaccgtcgtcatcgctcggaacgcagacgtacatctgcaatgtcaatcacaagccctccaatactaaggtagataagaaagtagaaccgaagtcgtgtgataagacccatacatgccctccgtgccccgcaccggaactcttgggtggcccatcagtctttctgttcccgccaaagcccaaagacacactgatgatttcgcgcacgcccgaagtcacttgcgtcgtggtggatgtgtcgcatgaggacccggaggtcaagttcaactggtacgtcgatggtgtagaagtccacaacgccaagaccaagcctcgggaggagcagtataactccacctaccgggtagtgagcgtgcttacagtgctccatcaggactggctgaacggcaaagaatacaaatgcaaagtcagcaacaaagcgctgccagcgcccatcgagaaaacaattagcaaagcgaaagggcagcccagagaacctcaagtgtatacattgccgccgtcgcgggaggaaatgacaaagaatcaggtatccctgacgtgtcttgtgaaaggcttttacccatccgacattgcggtagagtgggagtcgaatgggcaacccgagaacaactataagacgactcccccagtcttggattcagacggatcctttttcttgtactcgaaactcacagtcgacaagtccagatggcagcaggggaacgtgttcagctgcagcgtgatgcacgaggcccttcacaaccactatacgcagaaatcattaagcttatcgccaggtaaaggaggtggcgggagcgggggagggggatccggtggcggagggtcgcaagtgcagctggtgcaaagcggaggtgggcttgtccaacccggaggctcacttagattgtcatgtgcggcgagcggttttacctttgacgattatgcgatgcactgggtccgccaggcaccggggaaggggctcgaatgggtagccggaatctcgtgggactcggggtccacgggctatgcggactcggtcaaggggcgcttcacaatctcaagggacaatgccaaaaactcgctctatctgcagatgaactcattgcgagctgaggacacggcgctttactactgtgcgcgggatttgggtgcctatcaatgggtagaagggtttgattactgggggcagggaactctcgtgaccgtgtccagcgcatcgacgggaggaggaggttccgggggtgggggaagcgggggtggagggtcaggaggtgggggatcgtcatacgagctgacgcaagatcccgcggtatccgtcgcccttgggcagaccgtcaggattacgtgccagggagactcacttagaagctactacgcttcctggtatcagcaaaagccgggacaggcacccgtgttggtgatctacgggaagaataaccggcccagcgggattcctgaccgcttttcgggctccacctcagggaactcggcctcgttgactatcacgggtgcgcaagccgaggacgaggcagactattactgtaactcgcgagattcccctggtaatcagtgggtctttgggggaggaactaaggtaacggtattggggtgataa

SEQ ID NO: 238 - protein, 720 aa, Artificial Sequence
  Description of Artificial Sequence: Synthetic polypeptide
EVQLLQSGGGLVQPGGSLRLSCAASGFDFSSYPMHWVRQAPGKGLEWVGSISSSGGATPYADSVKGRFTISRDNSKNTLYLQMNSLRPEDTAVYYCAKDFYTILTGNAFDMWGQGTSVTVSSASTKGPSVFPLAPSSKSTSGGTAALGCLVKDYFPEPVTVSWNSGALTSGVHTFPAVLQSSGLYSLSSVVTVPSSSLGTQTYICNVNHKPSNTKVDKKVEPKSCDKTHTCPPCPAPELLGGPSVFLFPPKPKDTLMISRTPEVTCVVVDVSHEDPEVKFNWYVDGVEVHNAKTKPREEQYNSTYRVVSVLTVLHQDWLNGKEYKCKVSNKALPAPIEKTISKAKGQPREPQVYTLPPSREEMTKNQVSLTCLVKGFYPSDIAVEWESNGQPENNYKTTPPVLDSDGSFFLYSKLTVDKSRWQQGNVFSCSVMHEALHNHYTQKSLSLSPGGGGGSGGGGSGGGGSQVQLVQSGGGLVQPGGSLRLSCAASGFTFDDYAMHWVRQAPGKGLEWVAGISWDSGSTGYADSVKGRFTISRDNAKNSLYLQMNSLRAEDTALYYCARDLGAYQWVEGFDYWGQGTLVTVSSASTGGGGSGGGGSGGGGSGGGGSSYELTQDPAVSVALGQTVRITCQGDSLRSYYASWYQQKPGQAPVLVIYGKNNRPSGIPDRFSGSTSGNSASLTITGAQAEDEADYYCNSRDSPGNQWVFGGGTKVTVLG

SEQ ID NO: 239 - DNA, 2154 bp, Artificial Sequence
  Description of Artificial Sequence: Synthetic polynucleotide
gaagtacagcttttgcaaagcgggggtggcttggtccagcccggagggtccttgaggctctcgtgtgcggcctcagggttcgacttttcgtcgtatcccatgcactgggtccgccaggcccctggtaaagggctggagtgggtaggatccattagctcctcgggaggggcaactccgtatgcggattcagtgaaaggccgattcacaatctcgcgggataactcgaagaacaccctgtaccttcaaatgaattcactcagaccagaggacacggcagtctactattgcgctaaggacttttacactatcttgacgggaaatgcgtttgatatgtggggacagggaacctcagtgacggtcagctcagctagcactaagggaccgtccgtgtttcccctcgcgcctagctcgaagagcacatcgggaggaacagcggcgctcggctgtctcgtcaaagactacttccccgagccggtgaccgtgagctggaattccggagcgttgacctcaggggtgcatacattccctgccgtactgcaatcatcagggctctactcattgtcgagcgtagtgactgtaccgtcgtcatcgctcggaacgcagacgtacatctgcaatgtcaatcacaagccctccaatactaaggtagataagaaagtagaaccgaagtcgtgtgataagacccatacatgccctccgtgccccgcaccggaactcttgggtggcccatcagtctttctgttcccgccaaagcccaaagacacactgatgatttcgcgcacgcccgaagtcacttgcgtcgtggtggatgtgtcgcatgaggacccggaggtcaagttcaactggtacgtcgatggtgtagaagtccacaacgccaagaccaagcctcgggaggagcagtataactccacctaccgggtagtgagcgtgcttacagtgctccatcaggactggctgaacggcaaagaatacaaatgcaaagtcagcaacaaagcgctgccagcgcccatcgagaaaacaattagcaaagcgaaagggcagcccagagaacctcaagtgtatacattgccgccgtcgcgggaggaaatgacaaagaatcaggtatccctgacgtgtcttgtgaaaggcttttacccatccgacattgcggtagagtgggagtcgaatgggcaacccgagaacaactataagacgactcccccagtcttggattcagacggatcctttttcttgtactcgaaactcacagtcgacaagtccagatggcagcaggggaacgtgttcagctgcagcgtgatgcacgaggcccttcacaaccactatacgcagaaatcattaagcttatcgccaggtaaaggaggtggcgggagcgggggagggggatccggtggcggagggtcggaagtgcagctggtggagagcggaggtgggcttgtccaaccgggcaggtcacttagattgtcatgtgcggcgagcggttttacctttgacgattatgcgatgcactgggtccgccaggcaccggggaaggggctcgaatgggtatcaggaatctcgtggaattcggggtccacgggctatgcggactcggtcaaggggcgcttcacaatctcaagggacaatgccaaaaactcgctctatttgcaaatgaactcattgcgagctgaggacacggcgctttactactgtgcgcgggatttgggctttaaccaatgggtagacgggtttgattactgggggcagggaactctcgtgaccgtgtccagcgcatcgacgggaggaggaggttccgggggtgggggaagcgggggtggagggtcatcgtcagagctgacgcaagatcccgcggtatccgtcgcccttgggcagaccgtcaggattacgtgccagggagactcacttagaagctactacgcttcctggtatcagcaaaagccgggacaggcacccgtgttggtgatctacgggaagaataaccggcccagcgggattcctgaccgcttttcgggctcctcatcggggaacacagcctcgttgactatcacgggtgcgcaagccgaggacgaggcagactattactgtaactcgcgagatacgcctggtgaccagtgggtctttgggggaggaactaaggtaacggtattggggtgataa

SEQ ID NO: 240 - protein, 715 aa, Artificial Sequence
  Description of Artificial Sequence: Synthetic polypeptide
EVQLLQSGGGLVQPGGSLRLSCAASGFDFSSYPMHWVRQAPGKGLEWVGSISSSGGATPYADSVKGRFTISRDNSKNTLYLQMNSLRPEDTAVYYCAKDFYTILTGNAFDMWGQGTSVTVSSASTKGPSVFPLAPSSKSTSGGTAALGCLVKDYFPEPVTVSWNSGALTSGVHTFPAVLQSSGLYSLSSVVTVPSSSLGTQTYICNVNHKPSNTKVDKKVEPKSCDKTHTCPPCPAPELLGGPSVFLFPPKPKDTLMISRTPEVTCVVVDVSHEDPEVKFNWYVDGVEVHNAKTKPREEQYNSTYRVVSVLTVLHQDWLNGKEYKCKVSNKALPAPIEKTISKAKGQPREPQVYTLPPSREEMTKNQVSLTCLVKGFYPSDIAVEWESNGQPENNYKTTPPVLDSDGSFFLYSKLTVDKSRWQQGNVFSCSVMHEALHNHYTQKSLSLSPGGGGGSGGGGSGGGGSEVQLVESGGGLVQPGRSLRLSCAASGFTFDDYAMHWVRQAPGKGLEWVSGISWNSGSTGYADSVKGRFTISRDNAKNSLYLQMNSLRAEDTALYYCARDLGFNQWVDGFDYWGQGTLVTVSSASTGGGGSGGGGSGGGGSSSELTQDPAVSVALGQTVRITCQGDSLRSYYASWYQQKPGQAPVLVIYGKNNRPSGIPDRFSGSSSGNTASLTITGAQAEDEADYYCNSRDTPGDQWVFGGGTKVTVLG

SEQ ID NO: 241 - DNA, 2154 bp, Artificial Sequence
  Description of Artificial Sequence: Synthetic polynucleotide
gaagtacagcttttgcaaagcgggggtggcttggtccagcccggagggtccttgaggctctcgtgtgcggcctcagggttcgacttttcgtcgtatcccatgcactgggtccgccaggcccctggtaaagggctggagtgggtaggatccattagctcctcgggaggggcaactccgtatgcggattcagtgaaaggccgattcacaatctcgcgggataactcgaagaacaccctgtaccttcaaatgaattcactcagaccagaggacacggcagtctactattgcgctaaggacttttacactatcttgacgggaaatgcgtttgatatgtggggacagggaacctcagtgacggtcagctcagctagcactaagggaccgtccgtgtttcccctcgcgcctagctcgaagagcacatcgggaggaacagcggcgctcggctgtctcgtcaaagactacttccccgagccggtgaccgtgagctggaattccggagcgttgacctcaggggtgcatacattccctgccgtactgcaatcatcagggctctactcattgtcgagcgtagtgactgtaccgtcgtcatcgctcggaacgcagacgtacatctgcaatgtcaatcacaagccctccaatactaaggtagataagaaagtagaaccgaagtcgtgtgataagacccatacatgccctccgtgccccgcaccggaactcttgggtggcccatcagtctttctgttcccgccaaagcccaaagacacactgatgatttcgcgcacgcccgaagtcacttgcgtcgtggtggatgtgtcgcatgaggacccggaggtcaagttcaactggtacgtcgatggtgtagaagtccacaacgccaagaccaagcctcgggaggagcagtataactccacctaccgggtagtgagcgtgcttacagtgctccatcaggactggctgaacggcaaagaatacaaatgcaaagtcagcaacaaagcgctgccagcgcccatcgagaaaacaattagcaaagcgaaagggcagcccagagaacctcaagtgtatacattgccgccgtcgcgggaggaaatgacaaagaatcaggtatccctgacgtgtcttgtgaaaggcttttacccatccgacattgcggtagagtgggagtcgaatgggcaacccgagaacaactataagacgactcccccagtcttggattcagacggatcctttttcttgtactcgaaactcacagtcgacaagtccagatggcagcaggggaacgtgttcagctgcagcgtgatgcacgaggcccttcacaaccactatacgcagaaatcattaagcttatcgccaggtaaaggaggtggcgggagcgggggagggggatccggtggcggagggtcggaagtgcagctggtggagagcggaggtgggcttgtccaaccgggcaggtcacttagattgtcatgtgcggcgagcggttttacctttgacgattatgcgatgcactgggtccgccaggcaccggggaaggggctcgaatgggtatcaggaatctcgtggaactcggggtccacgggctatgcggactcggtcaaggggcgcttcacaatctcaagggacaatgccaaaaactcgctctatctccagatgaactcattgcgagctgaggacacggcgctttactactgtgcgcgggatttgggttacaaccaatggcttgaagggtttgattactgggggcagggaactctcgtgaccgtgtccagcgcatcgacgggaggaggaggttccgggggtgggggaagcgggggtggagggtcatcgtcagagctgacgcaagatcccgcggtatccgtcgcccttgggcagaccgtcaggattacgtgccagggagactcacttagaagctactacgcttcctggtatcagcaaaagccgggacaggcacccgtgttggtgatctacgggaagaataaccggcccagcgggattcctgaccgcttttcgggctcctcatcggggaacacagcctcgttgactatcacgggtgcgcaagccgaggacgaggcagactattactgtatgtcgcgagatcaccctggtaatcagtgggtctttgggggaggaactaaggtaacggtattggggtgataa

SEQ ID NO: 242 - protein, 715 aa, Artificial Sequence
  Description of Artificial Sequence: Synthetic polypeptide
EVQLLQSGGGLVQPGGSLRLSCAASGFDFSSYPMHWVRQAPGKGLEWVGSISSSGGATPYADSVKGRFTISRDNSKNTLYLQMNSLRPEDTAVYYCAKDFYTILTGNAFDMWGQGTSVTVSSASTKGPSVFPLAPSSKSTSGGTAALGCLVKDYFPEPVTVSWNSGALTSGVHTFPAVLQSSGLYSLSSVVTVPSSSLGTQTYICNVNHKPSNTKVDKKVEPKSCDKTHTCPPCPAPELLGGPSVFLFPPKPKDTLMISRTPEVTCVVVDVSHEDPEVKFNWYVDGVEVHNAKTKPREEQYNSTYRVVSVLTVLHQDWLNGKEYKCKVSNKALPAPIEKTISKAKGQPREPQVYTLPPSREEMTKNQVSLTCLVKGFYPSDIAVEWESNGQPENNYKTTPPVLDSDGSFFLYSKLTVDKSRWQQGNVFSCSVMHEALHNHYTQKSLSLSPGGGGGSGGGGSGGGGSEVQLVESGGGLVQPGRSLRLSCAASGFTFDDYAMHWVRQAPGKGLEWVSGISWNSGSTGYADSVKGRFTISRDNAKNSLYLQMNSLRAEDTALYYCARDLGYNQWLEGFDYWGQGTLVTVSSASTGGGGSGGGGSGGGGSSSELTQDPAVSVALGQTVRITCQGDSLRSYYASWYQQKPGQAPVLVIYGKNNRPSGIPDRFSGSSSGNTASLTITGAQAEDEADYYCMSRDHPGNQWVFGGGTKVTVLG

SEQ ID NO: 243 - DNA, 2154 bp, Artificial Sequence
  Description of Artificial Sequence: Synthetic polynucleotide
gaagtacagcttttgcaaagcgggggtggcttggtccagcccggagggtccttgaggctctcgtgtgcggcctcagggttcgacttttcgtcgtatcccatgcactgggtccgccaggcccctggtaaagggctggagtgggtaggatccattagctcctcgggaggggcaactccgtatgcggattcagtgaaaggccgattcacaatctcgcgggataactcgaagaacaccctgtaccttcaaatgaattcactcagaccagaggacacggcagtctactattgcgctaaggacttttacactatcttgacgggaaatgcgtttgatatgtggggacagggaacctcagtgacggtcagctcagctagcactaagggaccgtccgtgtttcccctcgcgcctagctcgaagagcacatcgggaggaacagcggcgctcggctgtctcgtcaaagactacttccccgagccggtgaccgtgagctggaattccggagcgttgacctcaggggtgcatacattccctgccgtactgcaatcatcagggctctactcattgtcgagcgtagtgactgtaccgtcgtcatcgctcggaacgcagacgtacatctgcaatgtcaatcacaagccctccaatactaaggtagataagaaagtagaaccgaagtcgtgtgataagacccatacatgccctccgtgccccgcaccggaactcttgggtggcccatcagtctttctgttcccgccaaagcccaaagacacactgatgatttcgcgcacgcccgaagtcacttgcgtcgtggtggatgtgtcgcatgaggacccggaggtcaagttcaactggtacgtcgatggtgtagaagtccacaacgccaagaccaagcctcgggaggagcagtataactccacctaccgggtagtgagcgtgcttacagtgctccatcaggactggctgaacggcaaagaatacaaatgcaaagtcagcaacaaagcgctgccagcgcccatcgagaaaacaattagcaaagcgaaagggcagcccagagaacctcaagtgtatacattgccgccgtcgcgggaggaaatgacaaagaatcaggtatccctgacgtgtcttgtgaaaggcttttacccatccgacattgcggtagagtgggagtcgaatgggcaacccgagaacaactataagacgactcccccagtcttggattcagacggatcctttttcttgtactcgaaactcacagtcgacaagtccagatggcagcaggggaacgtgttcagctgcagcgtgatgcacgaggcccttcacaaccactatacgcagaaatcattaagcttatcgccaggtaaaggaggtggcgggagcgggggagggggatccggtggcggagggtcggaagtgcagctggtggagagcggaggtgggcttgtccaaccgggcaggtcacttagattgtcatgtgcggcgagcggttttacctttgacgattatgcgatgcactgggtccgccaggcaccggggaaggggctcgaatgggtatcaggaatctcgtggaactcggggtccgtgggctatgcggactcggtcaaggggcgcttcacaatctcaagggacaatgccaaaaactcgctctacttgcagatgaactcattgcgagctgaggacacggcgctttactactgtgcgcgggatttgggctacaatcaatggttggaagggtttgattactgggggcagggaactctcgtgaccgtgtccagcgcatcgacgggaggaggaggttccgggggtgggggaagcgggggtggagggtcatcgtcagagctgacgcaagatcccgcggtatccgtcgcccttgggcagaccgtcaggattacgtgccagggagactcacttagaagctactacgcttcctggtatcagcaaaagccgggacaggcacccgtgttggtgatctacgggaagaataaccggcccagcgggattcctgaccgcttttcgggctcctcatcggggaacacagcctcgttgactatcacgggtgcgcaagccgaggacgaggcagactattactgtatgtcgcgagattcccctggtaatcagtgggtctttgggggaggaactaaggtaacggtattggggtgataa

SEQ ID NO: 244 - protein, 715 aa, Artificial Sequence
  Description of Artificial Sequence: Synthetic polypeptide
EVQLLQSGGGLVQPGGSLRLSCAASGFDFSSYPMHWVRQAPGKGLEWVGSISSSGGATPYADSVKGRFTISRDNSKNTLYLQMNSLRPEDTAVYYCAKDFYTILTGNAFDMWGQGTSVTVSSASTKGPSVFPLAPSSKSTSGGTAALGCLVKDYFPEPVTVSWNSGALTSGVHTFPAVLQSSGLYSLSSVVTVPSSSLGTQTYICNVNHKPSNTKVDKKVEPKSCDKTHTCPPCPAPELLGGPSVFLFPPKPKDTLMISRTPEVTCVVVDVSHEDPEVKFNWYVDGVEVHNAKTKPREEQYNSTYRVVSVLTVLHQDWLNGKEYKCKVSNKALPAPIEKTISKAKGQPREPQVYTLPPSREEMTKNQVSLTCLVKGFYPSDIAVEWESNGQPENNYKTTPPVLDSDGSFFLYSKLTVDKSRWQQGNVFSCSVMHEALHNHYTQKSLSLSPGGGGGSGGGGSGGGGSEVQLVESGGGLVQPGRSLRLSCAASGFTFDDYAMHWVRQAPGKGLEWVSGISWNSGSVGYADSVKGRFTISRDNAKNSLYLQMNSLRAEDTALYYCARDLGYNQWLEGFDYWGQGTLVTVSSASTGGGGSGGGGSGGGGSSSELTQDPAVSVALGQTVRITCQGDSLRSYYASWYQQKPGQAPVLVIYGKNNRPSGIPDRFSGSSSGNTASLTITGAQAEDEADYYCMSRDSPGNQWVFGGGTKVTVLG

SEQ ID NO: 245 - DNA, 2166 bp, Artificial Sequence
  Description of Artificial Sequence: Synthetic polynucleotide
gaggtgcagttgctccaatccggaggtggacttgtacagccgggtgggtcgctgaggttgtcatgtgcggcgagcggattcttcttctcgaagtaccctatgcactgggtgagacaggctcccggcaaaggattggaatgggtatcatcgatttcgagcgatggcggagccacggtctatgcagactccgtcaaaggccggtttactatctcacgcgataacagcaagaatacactgtatctccagatgaactcgctgagggcggaggacacagccgtgtactactgcgccaaagacttctacacgtggctcaccgggaatgcgtttgatagctggggacaagggacttcggtcacggtgtcctcggctagcacgaaggggcctagcgtctttccgctcgccccctcgtcaaaatcaacgtcgggtggaacggccgcattgggttgtctcgtaaaggactactttccggaacccgtcaccgtatcgtggaattcaggcgccctgacttccggggtccacacctttcccgctgtcttgcagtcctcgggtttgtattcactgtcgtcagtggtgacagtaccatcatcctcactgggaactcaaacgtacatctgcaacgtgaaccacaagccgagcaacactaaggtggataagaaggtagagcccaagtcatgcgacaaaacgcatacatgcccgccatgccccgcaccagaacttttgggaggtccgtcagtgtttctctttccgcctaagcccaaagacacactgatgatttcccggacgcccgaagtcacttgtgtggtcgtcgacgtgtcccatgaagatcccgaagtaaagttcaactggtatgtcgacggtgtggaagtccacaatgcaaaaaccaagcccagggaagaacagtacaacagcacatatcgagtggtgagcgtgttgaccgtgctgcaccaagactggctcaatggaaaggagtacaaatgcaaagtgtccaacaaggcactgcctgcgcccattgagaaaacgatttcgaaagcaaagggacagccaagagaaccccaagtgtatacccttcccccgtcgcgcgaggaaatgacgaagaaccaggtatcgttgacgtgtcttgtaaagggattctatccctcggacatcgcggtcgagtgggagtccaacggacagccagagaataactacaaaaccacaccgcctgtgctggattccgacgggtcgtttttcttgtattcgaagcttacggtagacaaaagccggtggcagcagggtaatgtgttcagctgctcagtaatgcacgaggctctccataatcattacactcagaagtccctttccctttcgccgggagggggtgggggatccggcggaggtgggtcgggaggtggaggatcacaagtgcaattggtacagtcgggaggcgggcttgtgcaacccggagggtcactgcgcctttcatgtgcggcgagcggtttcacgttcgatgattatgcgatgcattgggtacggcaggcacctggcaaagggttggagtgggtagccggaatctcgtggaatagcgggagcatcggttatgcggattccgtcaaagggaggtttacaatttcgagggacaatgcgaagaacagcctgtatctccaaatgaattcgctcaggcccgaagataccgccgtctactactgcgcgagggacttgggatacaaccagtgggtggaagggtttgattactgggggcaggggactctggtaactgtctcatcggcatcgactggtggtggcgggtccggagggggaggaagcggaggaggcgggagcggaggcggtgggtccagctacgaactgactcaagatccggccgtatcggtggccctcggacaaacagtgcgaatcacctgtcagggggatagccttagatcgtactacgcttcgtggtatcagcaaaagcccggacaggcaccagtgcttgtgatctacggaaagaacaatagaccgagcggaattccggatcggttttcgggttcgacttccggaaattcggcgtcgctcacgatcaccggagctcaggcagaggatgaagcggattactattgtaattcccgcgattcgtcggggaatcattgggtgttcggtgggggtacaaaggtaactgtactcggctgataa

SEQ ID NO: 246 - protein, 720 aa, Artificial Sequence
  Description of Artificial Sequence: Synthetic polypeptide
EVQLLQSGGGLVQPGGSLRLSCAASGFFFSKYPMHWVRQAPGKGLEWVSSISSDGGATVYADSVKGRFTISRDNSKNTLYLQMNSLRAEDTAVYYCAKDFYTWLTGNAFDSWGQGTSVTVSSASTKGPSVFPLAPSSKSTSGGTAALGCLVKDYFPEPVTVSWNSGALTSGVHTFPAVLQSSGLYSLSSVVTVPSSSLGTQTYICNVNHKPSNTKVDKKVEPKSCDKTHTCPPCPAPELLGGPSVFLFPPKPKDTLMISRTPEVTCVVVDVSHEDPEVKFNWYVDGVEVHNAKTKPREEQYNSTYRVVSVLTVLHQDWLNGKEYKCKVSNKALPAPIEKTISKAKGQPREPQVYTLPPSREEMTKNQVSLTCLVKGFYPSDIAVEWESNGQPENNYKTTPPVLDSDGSFFLYSKLTVDKSRWQQGNVFSCSVMHEALHNHYTQKSLSLSPGGGGGSGGGGSGGGGSQVQLVQSGGGLVQPGGSLRLSCAASGFTFDDYAMHWVRQAPGKGLEWVAGISWNSGSIGYADSVKGRFTISRDNAKNSLYLQMNSLRPEDTAVYYCARDLGYNQWVEGFDYWGQGTLVTVSSASTGGGGSGGGGSGGGGSGGGGSSYELTQDPAVSVALGQTVRITCQGDSLRSYYASWYQQKPGQAPVLVIYGKNNRPSGIPDRFSGSTSGNSASLTITGAQAEDEADYYCNSRDSSGNHWVFGGGTKVTVLG

SEQ ID NO: 247 - DNA, 2154 bp, Artificial Sequence
  Description of Artificial Sequence: Synthetic polynucleotide
gaggtgcagttgctccaatccggaggtggacttgtacagccgggtgggtcgctgaggttgtcatgtgcggcgagcggattcttcttctcgaagtaccctatgcactgggtgagacaggctcccggcaaaggattggaatgggtatcatcgatttcgagcgatggcggagccacggtctatgcagactccgtcaaaggccggtttactatctcacgcgataacagcaagaatacactgtatctccagatgaactcgctgagggcggaggacacagccgtgtactactgcgccaaagacttctacacgtggctcaccgggaatgcgtttgatagctggggacaagggacttcggtcacggtgtcctcggctagcactaagggaccgtccgtgtttcccctcgcgcctagctcgaagagcacatcgggaggaacagcggcgctcggctgtctcgtcaaagactacttccccgagccggtgaccgtgagctggaattccggagcgttgacctcaggggtgcatacattccctgccgtactgcaatcatcagggctctactcattgtcgagcgtagtgactgtaccgtcgtcatcgctcggaacgcagacgtacatctgcaatgtcaatcacaagccctccaatactaaggtagataagaaagtagaaccgaagtcgtgtgataagacccatacatgccctccgtgccccgcaccggaactcttgggtggcccatcagtctttctgttcccgccaaagcccaaagacacactgatgatttcgcgcacgcccgaagtcacttgcgtcgtggtggatgtgtcgcatgaggacccggaggtcaagttcaactggtacgtcgatggtgtagaagtccacaacgccaagaccaagcctcgggaggagcagtataactccacctaccgggtagtgagcgtgcttacagtgctccatcaggactggctgaacggcaaagaatacaaatgcaaagtcagcaacaaagcgctgccagcgcccatcgagaaaacaattagcaaagcgaaagggcagcccagagaacctcaagtgtatacattgccgccgtcgcgggaggaaatgacaaagaatcaggtatccctgacgtgtcttgtgaaaggcttttacccatccgacattgcggtagagtgggagtcgaatgggcaacccgagaacaactataagacgactcccccagtcttggattcagacggatcctttttcttgtactcgaaactcacagtcgacaagtccagatggcagcaggggaacgtgttcagctgcagcgtgatgcacgaggcccttcacaaccactatacgcagaaatcattaagcttatcgccaggtaaaggaggtggcgggagcgggggagggggatccggtggcggagggtcggaagtgcagctggtggagagcggaggtgggcttgtccaaccgggcaggtcacttagattgtcatgtgcggcgagcggttttacctttgacgattatgcgatgcactgggtccgccaggcaccggggaaggggctcgaatgggtatcaggaatctcgtgggactcggggtccacgggctatgcggactcggtcaaggggcgcttcacaatctcaagggacaatgccaaaaactcgctctatcttcagatgaactcattgcgagctgaggacacggcgctttactactgtgcgcgggatttgggtgcctatcaatgggtagaagggtttgattactgggggcagggaactctcgtgaccgtgtccagcgcatcgacgggaggaggaggttccgggggtgggggaagcgggggtggagggtcatcgtcagagctgacgcaagatcccgcggtatccgtcgcccttgggcagaccgtcaggattacgtgccagggagactcacttagaagctactacgcttcctggtatcagcaaaagccgggacaggcacccgtgttggtgatctacgggaagaataaccggcccagcgggattcctgaccgcttttcgggctcctcatcggggaacacagcctcgttgactatcacgggtgcgcaagccgaggacgaggcagactattactgtgaatcgcgagattcccctggtaatcagtgggtctttgggggaggaactaaggtaacggtattggggtgataa

SEQ ID NO: 248 - protein, 715 aa, Artificial Sequence
  Description of Artificial Sequence: Synthetic polypeptide
EVQLLQSGGGLVQPGGSLRLSCAASGFFFSKYPMHWVRQAPGKGLEWVSSISSDGGATVYADSVKGRFTISRDNSKNTLYLQMNSLRAEDTAVYYCAKDFYTWLTGNAFDSWGQGTSVTVSSASTKGPSVFPLAPSSKSTSGGTAALGCLVKDYFPEPVTVSWNSGALTSGVHTFPAVLQSSGLYSLSSVVTVPSSSLGTQTYICNVNHKPSNTKVDKKVEPKSCDKTHTCPPCPAPELLGGPSVFLFPPKPKDTLMISRTPEVTCVVVDVSHEDPEVKFNWYVDGVEVHNAKTKPREEQYNSTYRVVSVLTVLHQDWLNGKEYKCKVSNKALPAPIEKTISKAKGQPREPQVYTLPPSREEMTKNQVSLTCLVKGFYPSDIAVEWESNGQPENNYKTTPPVLDSDGSFFLYSKLTVDKSRWQQGNVFSCSVMHEALHNHYTQKSLSLSPGGGGGSGGGGSGGGGSEVQLVESGGGLVQPGRSLRLSCAASGFTFDDYAMHWVRQAPGKGLEWVSGISWDSGSTGYADSVKGRFTISRDNAKNSLYLQMNSLRAEDTALYYCARDLGAYQWVEGFDYWGQGTLVTVSSASTGGGGSGGGGSGGGGSSSELTQDPAVSVALGQTVRITCQGDSLRSYYASWYQQKPGQAPVLVIYGKNNRPSGIPDRFSGSSSGNTASLTITGAQAEDEADYYCESRDSPGNQWVFGGGTKVTVLG

SEQ ID NO: 249 - DNA, 2169 bp, Artificial Sequence
  Description of Artificial Sequence: Synthetic polynucleotide
gaggtgcagttgctccaatccggaggtggacttgtacagccgggtgggtcgctgaggttgtcatgtgcggcgagcggattcttcttctcgaagtaccctatgcactgggtgagacaggctcccggcaaaggattggaatgggtatcatcgatttcgagcgatggcggagccacggtctatgcagactccgtcaaaggccggtttactatctcacgcgataacagcaagaatacactgtatctccagatgaactcgctgagggcggaggacacagccgtgtactactgcgccaaagacttctacacgtggctcaccgggaatgcgtttgatagctggggacaagggacttcggtcacggtgtcctcggctagcactaagggaccgtccgtgtttcccctcgcgcctagctcgaagagcacatcgggaggaacagcggcgctcggctgtctcgtcaaagactacttccccgagccggtgaccgtgagctggaattccggagcgttgacctcaggggtgcatacattccctgccgtactgcaatcatcagggctctactcattgtcgagcgtagtgactgtaccgtcgtcatcgctcggaacgcagacgtacatctgcaatgtcaatcacaagccctccaatactaaggtagataagaaagtagaaccgaagtcgtgtgataagacccatacatgccctccgtgccccgcaccggaactcttgggtggcccatcagtctttctgttcccgccaaagcccaaagacacactgatgatttcgcgcacgcccgaagtcacttgcgtcgtggtggatgtgtcgcatgaggacccggaggtcaagttcaactggtacgtcgatggtgtagaagtccacaacgccaagaccaagcctcgggaggagcagtataactccacctaccgggtagtgagcgtgcttacagtgctccatcaggactggctgaacggcaaagaatacaaatgcaaagtcagcaacaaagcgctgccagcgcccatcgagaaaacaattagcaaagcgaaagggcagcccagagaacctcaagtgtatacattgccgccgtcgcgggaggaaatgacaaagaatcaggtatccctgacgtgtcttgtgaaaggcttttacccatccgacattgcggtagagtgggagtcgaatgggcaacccgagaacaactataagacgactcccccagtcttggattcagacggatcctttttcttgtactcgaaactcacagtcgacaagtccagatggcagcaggggaacgtgttcagctgcagcgtgatgcacgaggcccttcacaaccactatacgcagaaatcattaagcttatcgccaggtaaaggaggtggcgggagcgggggagggggatccggtggcggagggtcgcaagtgcagctggtgcaaagcggaggtgggcttgtccaacccggaggctcacttagattgtcatgtgcggcgagcggttttacctttgacgattatgcgatgcactgggtccgccaggcaccggggaaggggctcgaatgggtagccggaatctcgtgggactcggggtccacgggctatgcggactcggtcaaggggcgcttcacaatctcaagggacaatgccaaaaactcgctctatctgcagatgaactcattgcgagctgaggacacggcgctttactactgtgcgcgggatttgggtgcctatcaatgggtagaagggtttgattactgggggcagggaactctcgtgaccgtgtccagcgcatcgacgggaggaggaggttccgggggtgggggaagcgggggtggagggtcaggaggtgggggatcgtcatacgagctgacgcaagatcccgcggtatccgtcgcccttgggcagaccgtcaggattacgtgccagggagactcacttagaagctactacgcttcctggtatcagcaaaagccgggacaggcacccgtgttggtgatctacgggaagaataaccggcccagcgggattcctgaccgcttttcgggctccacctcagggaactcggcctcgttgactatcacgggtgcgcaagccgaggacgaggcagactattactgtaactcgcgagattcccctggtaatcagtgggtctttgggggaggaactaaggtaacggtattggggtgataa

SEQ ID NO: 250 - protein, 720 aa, Artificial Sequence
  Description of Artificial Sequence: Synthetic polypeptide
EVQLLQSGGGLVQPGGSLRLSCAASGFFFSKYPMHWVRQAPGKGLEWVSSISSDGGATVYADSVKGRFTISRDNSKNTLYLQMNSLRAEDTAVYYCAKDFYTWLTGNAFDSWGQGTSVTVSSASTKGPSVFPLAPSSKSTSGGTAALGCLVKDYFPEPVTVSWNSGALTSGVHTFPAVLQSSGLYSLSSVVTVPSSSLGTQTYICNVNHKPSNTKVDKKVEPKSCDKTHTCPPCPAPELLGGPSVFLFPPKPKDTLMISRTPEVTCVVVDVSHEDPEVKFNWYVDGVEVHNAKTKPREEQYNSTYRVVSVLTVLHQDWLNGKEYKCKVSNKALPAPIEKTISKAKGQPREPQVYTLPPSREEMTKNQVSLTCLVKGFYPSDIAVEWESNGQPENNYKTTPPVLDSDGSFFLYSKLTVDKSRWQQGNVFSCSVMHEALHNHYTQKSLSLSPGGGGGSGGGGSGGGGSQVQLVQSGGGLVQPGGSLRLSCAASGFTFDDYAMHWVRQAPGKGLEWVAGISWDSGSTGYADSVKGRFTISRDNAKNSLYLQMNSLRAEDTALYYCARDLGAYQWVEGFDYWGQGTLVTVSSASTGGGGSGGGGSGGGGSGGGGSSYELTQDPAVSVALGQTVRITCQGDSLRSYYASWYQQKPGQAPVLVIYGKNNRPSGIPDRFSGSTSGNSASLTITGAQAEDEADYYCNSRDSPGNQWVFGGGTKVTVLG

SEQ ID NO: 251 - DNA, 2154 bp, Artificial Sequence
  Description of Artificial Sequence: Synthetic polynucleotide
gaggtgcagttgctccaatccggaggtggacttgtacagccgggtgggtcgctgaggttgtcatgtgcggcgagcggattcttcttctcgaagtaccctatgcactgggtgagacaggctcccggcaaaggattggaatgggtatcatcgatttcgagcgatggcggagccacggtctatgcagactccgtcaaaggccggtttactatctcacgcgataacagcaagaatacactgtatctccagatgaactcgctgagggcggaggacacagccgtgtactactgcgccaaagacttctacacgtggctcaccgggaatgcgtttgatagctggggacaagggacttcggtcacggtgtcctcggctagcactaagggaccgtccgtgtttcccctcgcgcctagctcgaagagcacatcgggaggaacagcggcgctcggctgtctcgtcaaagactacttccccgagccggtgaccgtgagctggaattccggagcgttgacctcaggggtgcatacattccctgccgtactgcaatcatcagggctctactcattgtcgagcgtagtgactgtaccgtcgtcatcgctcggaacgcagacgtacatctgcaatgtcaatcacaagccctccaatactaaggtagataagaaagtagaaccgaagtcgtgtgataagacccatacatgccctccgtgccccgcaccggaactcttgggtggcccatcagtctttctgttcccgccaaagcccaaagacacactgatgatttcgcgcacgcccgaagtcacttgcgtcgtggtggatgtgtcgcatgaggacccggaggtcaagttcaactggtacgtcgatggtgtagaagtccacaacgccaagaccaagcctcgggaggagcagtataactccacctaccgggtagtgagcgtgcttacagtgctccatcaggactggctgaacggcaaagaatacaaatgcaaagtcagcaacaaagcgctgccagcgcccatcgagaaaacaattagcaaagcgaaagggcagcccagagaacctcaagtgtatacattgccgccgtcgcgggaggaaatgacaaagaatcaggtatccctgacgtgtcttgtgaaaggcttttacccatccgacattgcggtagagtgggagtcgaatgggcaacccgagaacaactataagacgactcccccagtcttggattcagacggatcctttttcttgtactcgaaactcacagtcgacaagtccagatggcagcaggggaacgtgttcagctgcagcgtgatgcacgaggcccttcacaaccactatacgcagaaatcattaagcttatcgccaggtaaaggaggtggcgggagcgggggagggggatccggtggcggagggtcggaagtgcagctggtggagagcggaggtgggcttgtccaaccgggcaggtcacttagattgtcatgtgcggcgagcggttttacctttgacgattatgcgatgcactgggtccgccaggcaccggggaaggggctcgaatgggtatcaggaatctcgtggaattcggggtccacgggctatgcggactcggtcaaggggcgcttcacaatctcaagggacaatgccaaaaactcgctctatttgcaaatgaactcattgcgagctgaggacacggcgctttactactgtgcgcgggatttgggctttaaccaatgggtagacgggtttgattactgggggcagggaactctcgtgaccgtgtccagcgcatcgacgggaggaggaggttccgggggtgggggaagcgggggtggagggtcatcgtcagagctgacgcaagatcccgcggtatccgtcgcccttgggcagaccgtcaggattacgtgccagggagactcacttagaagctactacgcttcctggtatcagcaaaagccgggacaggcacccgtgttggtgatctacgggaagaataaccggcccagcgggattcctgaccgcttttcgggctcctcatcggggaacacagcctcgttgactatcacgggtgcgcaagccgaggacgaggcagactattactgtaactcgcgagatacgcctggtgaccagtgggtctttgggggaggaactaaggtaacggtattggggtgataa

SEQ ID NO: 252 - protein, 715 aa, Artificial Sequence
  Description of Artificial Sequence: Synthetic polypeptide
EVQLLQSGGGLVQPGGSLRLSCAASGFFFSKYPMHWVRQAPGKGLEWVSSISSDGGATVYADSVKGRFTISRDNSKNTLYLQMNSLRAEDTAVYYCAKDFYTWLTGNAFDSWGQGTSVTVSSASTKGPSVFPLAPSSKSTSGGTAALGCLVKDYFPEPVTVSWNSGALTSGVHTFPAVLQSSGLYSLSSVVTVPSSSLGTQTYICNVNHKPSNTKVDKKVEPKSCDKTHTCPPCPAPELLGGPSVFLFPPKPKDTLMISRTPEVTCVVVDVSHEDPEVKFNWYVDGVEVHNAKTKPREEQYNSTYRVVSVLTVLHQDWLNGKEYKCKVSNKALPAPIEKTISKAKGQPREPQVYTLPPSREEMTKNQVSLTCLVKGFYPSDIAVEWESNGQPENNYKTTPPVLDSDGSFFLYSKLTVDKSRWQQGNVFSCSVMHEALHNHYTQKSLSLSPGGGGGSGGGGSGGGGSEVQLVESGGGLVQPGRSLRLSCAASGFTFDDYAMHWVRQAPGKGLEWVSGISWNSGSTGYADSVKGRFTISRDNAKNSLYLQMNSLRAEDTALYYCARDLGFNQWVDGFDYWGQGTLVTVSSASTGGGGSGGGGSGGGGSSSELTQDPAVSVALGQTVRITCQGDSLRSYYASWYQQKPGQAPVLVIYGKNNRPSGIPDRFSGSSSGNTASLTITGAQAEDEADYYCNSRDTPGDQWVFGGGTKVTVLG

SEQ ID NO: 253 - DNA, 2154 bp, Artificial Sequence
  Description of Artificial Sequence: Synthetic polynucleotide
gaggtgcagttgctccaatccggaggtggacttgtacagccgggtgggtcgctgaggttgtcatgtgcggcgagcggattcttcttctcgaagtaccctatgcactgggtgagacaggctcccggcaaaggattggaatgggtatcatcgatttcgagcgatggcggagccacggtctatgcagactccgtcaaaggccggtttactatctcacgcgataacagcaagaatacactgtatctccagatgaactcgctgagggcggaggacacagccgtgtactactgcgccaaagacttctacacgtggctcaccgggaatgcgtttgatagctggggacaagggacttcggtcacggtgtcctcggctagcactaagggaccgtccgtgtttcccctcgcgcctagctcgaagagcacatcgggaggaacagcggcgctcggctgtctcgtcaaagactacttccccgagccggtgaccgtgagctggaattccggagcgttgacctcaggggtgcatacattccctgccgtactgcaatcatcagggctctactcattgtcgagcgtagtgactgtaccgtcgtcatcgctcggaacgcagacgtacatctgcaatgtcaatcacaagccctccaatactaaggtagataagaaagtagaaccgaagtcgtgtgataagacccatacatgccctccgtgccccgcaccggaactcttgggtggcccatcagtctttctgttcccgccaaagcccaaagacacactgatgatttcgcgcacgcccgaagtcacttgcgtcgtggtggatgtgtcgcatgaggacccggaggtcaagttcaactggtacgtcgatggtgtagaagtccacaacgccaagaccaagcctcgggaggagcagtataactccacctaccgggtagtgagcgtgcttacagtgctccatcaggactggctgaacggcaaagaatacaaatgcaaagtcagcaacaaagcgctgccagcgcccatcgagaaaacaattagcaaagcgaaagggcagcccagagaacctcaagtgtatacattgccgccgtcgcgggaggaaatgacaaagaatcaggtatccctgacgtgtcttgtgaaaggcttttacccatccgacattgcggtagagtgggagtcgaatgggcaacccgagaacaactataagacgactcccccagtcttggattcagacggatcctttttcttgtactcgaaactcacagtcgacaagtccagatggcagcaggggaacgtgttcagctgcagcgtgatgcacgaggcccttcacaaccactatacgcagaaatcattaagcttatcgccaggtaaaggaggtggcgggagcgggggagggggatccggtggcggagggtcggaagtgcagctggtggagagcggaggtgggcttgtccaaccgggcaggtcacttagattgtcatgtgcggcgagcggttttacctttgacgattatgcgatgcactgggtccgccaggcaccggggaaggggctcgaatgggtatcaggaatctcgtggaactcggggtccacgggctatgcggactcggtcaaggggcgcttcacaatctcaagggacaatgccaaaaactcgctctatctccagatgaactcattgcgagctgaggacacggcgctttactactgtgcgcgggatttgggttacaaccaatggcttgaagggtttgattactgggggcagggaactctcgtgaccgtgtccagcgcatcgacgggaggaggaggttccgggggtgggggaagcgggggtggagggtcatcgtcagagctgacgcaagatcccgcggtatccgtcgcccttgggcagaccgtcaggattacgtgccagggagactcacttagaagctactacgcttcctggtatcagcaaaagccgggacaggcacccgtgttggtgatctacgggaagaataaccggcccagcgggattcctgaccgcttttcgggctcctcatcggggaacacagcctcgttgactatcacgggtgcgcaagccgaggacgaggcagactattactgtatgtcgcgagatcaccctggtaatcagtgggtctttgggggaggaactaaggtaacggtattggggtgataa

SEQ ID NO: 254 - protein, 715 aa, Artificial Sequence
  Description of Artificial Sequence: Synthetic polypeptide
EVQLLQSGGGLVQPGGSLRLSCAASGFFFSKYPMHWVRQAPGKGLEWVSSISSDGGATVYADSVKGRFTISRDNSKNTLYLQMNSLRAEDTAVYYCAKDFYTWLTGNAFDSWGQGTSVTVSSASTKGPSVFPLAPSSKSTSGGTAALGCLVKDYFPEPVTVSWNSGALTSGVHTFPAVLQSSGLYSLSSVVTVPSSSLGTQTYICNVNHKPSNTKVDKKVEPKSCDKTHTCPPCPAPELLGGPSVFLFPPKPKDTLMISRTPEVTCVVVDVSHEDPEVKFNWYVDGVEVHNAKTKPREEQYNSTYRVVSVLTVLHQDWLNGKEYKCKVSNKALPAPIEKTISKAKGQPREPQVYTLPPSREEMTKNQVSLTCLVKGFYPSDIAVEWESNGQPENNYKTTPPVLDSDGSFFLYSKLTVDKSRWQQGNVFSCSVMHEALHNHYTQKSLSLSPGGGGGSGGGGSGGGGSEVQLVESGGGLVQPGRSLRLSCAASGFTFDDYAMHWVRQAPGKGLEWVSGISWNSGSTGYADSVKGRFTISRDNAKNSLYLQMNSLRAEDTALYYCARDLGYNQWLEGFDYWGQGTLVTVSSASTGGGGSGGGGSGGGGSSSELTQDPAVSVALGQTVRITCQGDSLRSYYASWYQQKPGQAPVLVIYGKNNRPSGIPDRFSGSSSGNTASLTITGAQAEDEADYYCMSRDHPGNQWVFGGGTKVTVLG

SEQ ID NO: 255 - DNA, 2154 bp, Artificial Sequence
  Description of Artificial Sequence: Synthetic polynucleotide
gaggtgcagttgctccaatccggaggtggacttgtacagccgggtgggtcgctgaggttgtcatgtgcggcgagcggattcttcttctcgaagtaccctatgcactgggtgagacaggctcccggcaaaggattggaatgggtatcatcgatttcgagcgatggcggagccacggtctatgcagactccgtcaaaggccggtttactatctcacgcgataacagcaagaatacactgtatctccagatgaactcgctgagggcggaggacacagccgtgtactactgcgccaaagacttctacacgtggctcaccgggaatgcgtttgatagctggggacaagggacttcggtcacggtgtcctcggctagcactaagggaccgtccgtgtttcccctcgcgcctagctcgaagagcacatcgggaggaacagcggcgctcggctgtctcgtcaaagactacttccccgagccggtgaccgtgagctggaattccggagcgttgacctcaggggtgcatacattccctgccgtactgcaatcatcagggctctactcattgtcgagcgtagtgactgtaccgtcgtcatcgctcggaacgcagacgtacatctgcaatgtcaatcacaagccctccaatactaaggtagataagaaagtagaaccgaagtcgtgtgataagacccatacatgccctccgtgccccgcaccggaactcttgggtggcccatcagtctttctgttcccgccaaagcccaaagacacactgatgatttcgcgcacgcccgaagtcacttgcgtcgtggtggatgtgtcgcatgaggacccggaggtcaagttcaactggtacgtcgatggtgtagaagtccacaacgccaagaccaagcctcgggaggagcagtataactccacctaccgggtagtgagcgtgcttacagtgctccatcaggactggctgaacggcaaagaatacaaatgcaaagtcagcaacaaagcgctgccagcgcccatcgagaaaacaattagcaaagcgaaagggcagcccagagaacctcaagtgtatacattgccgccgtcgcgggaggaaatgacaaagaatcaggtatccctgacgtgtcttgtgaaaggcttttacccatccgacattgcggtagagtgggagtcgaatgggcaacccgagaacaactataagacgactcccccagtcttggattcagacggatcctttttcttgtactcgaaactcacagtcgacaagtccagatggcagcaggggaacgtgttcagctgcagcgtgatgcacgaggcccttcacaaccactatacgcagaaatcattaagcttatcgccaggtaaaggaggtggcgggagcgggggagggggatccggtggcggagggtcggaagtgcagctggtggagagcggaggtgggcttgtccaaccgggcaggtcacttagattgtcatgtgcggcgagcggttttacctttgacgattatgcgatgcactgggtccgccaggcaccggggaaggggctcgaatgggtatcaggaatctcgtggaactcggggtccgtgggctatgcggactcggtcaaggggcgcttcacaatctcaagggacaatgccaaaaactcgctctacttgcagatgaactcattgcgagctgaggacacggcgctttactactgtgcgcgggatttgggctacaatcaatggttggaagggtttgattactgggggcagggaactctcgtgaccgtgtccagcgcatcgacgggaggaggaggttccgggggtgggggaagcgggggtggagggtcatcgtcagagctgacgcaagatcccgcggtatccgtcgcccttgggcagaccgtcaggattacgtgccagggagactcacttagaagctactacgcttcctggtatcagcaaaagccgggacaggcacccgtgttggtgatctacgggaagaataaccggcccagcgggattcctgaccgcttttcgggctcctcatcggggaacacagcctcgttgactatcacgggtgcgcaagccgaggacgaggcagactattactgtatgtcgcgagattcccctggtaatcagtgggtctttgggggaggaactaaggtaacggtattggggtgataa

SEQ ID NO: 256 - protein, 715 aa, Artificial Sequence
  Description of Artificial Sequence: Synthetic polypeptide
EVQLLQSGGGLVQPGGSLRLSCAASGFFFSKYPMHWVRQAPGKGLEWVSSISSDGGATVYADSVKGRFTISRDNSKNTLYLQMNSLRAEDTAVYYCAKDFYTWLTGNAFDSWGQGTSVTVSSASTKGPSVFPLAPSSKSTSGGTAALGCLVKDYFPEPVTVSWNSGALTSGVHTFPAVLQSSGLYSLSSVVTVPSSSLGTQTYICNVNHKPSNTKVDKKVEPKSCDKTHTCPPCPAPELLGGPSVFLFPPKPKDTLMISRTPEVTCVVVDVSHEDPEVKFNWYVDGVEVHNAKTKPREEQYNSTYRVVSVLTVLHQDWLNGKEYKCKVSNKALPAPIEKTISKAKGQPREPQVYTLPPSREEMTKNQVSLTCLVKGFYPSDIAVEWESNGQPENNYKTTPPVLDSDGSFFLYSKLTVDKSRWQQGNVFSCSVMHEALHNHYTQKSLSLSPGGGGGSGGGGSGGGGSEVQLVESGGGLVQPGRSLRLSCAASGFTFDDYAMHWVRQAPGKGLEWVSGISWNSGSVGYADSVKGRFTISRDNAKNSLYLQMNSLRAEDTALYYCARDLGYNQWLEGFDYWGQGTLVTVSSASTGGGGSGGGGSGGGGSSSELTQDPAVSVALGQTVRITCQGDSLRSYYASWYQQKPGQAPVLVIYGKNNRPSGIPDRFSGSSSGNTASLTITGAQAEDEADYYCMSRDSPGNQWVFGGGTKVTVLG

SEQ ID NO: 257 - DNA, 648 bp, Artificial Sequence
  Description of Artificial Sequence: Synthetic polynucleotide
tcaagcgaattgacccaagaccccgcagtctccgtggcgcttgggcaaactgtgagaatcacgtgtcaaggagacagccttagaagctactatgcctcgtggtatcagcagaagccaggtcaggccccagtcctcgtgatctacgggaagaacaaccgcccctcgggtattcccgaccgcttttcgggatcgtcctccggaaatacggcttccctgacgatcaccggagcccaagcggaagatgaggcggattactattgcgaatcacgggacagcccgggtaaccagtgggtattcgggggaggcactaaagtaacagtgctcggccagcctaaagcggcaccgtcggtgactctctttcccccgtcatcggaagagcttcaggcgaataaggcgacactggtatgcttggtcagcgatttctacccgggagccgtaacggtcgcgtggaaagcggacgggtcgcccgtgaaagtcggggtcgagacaacgaaaccctcaaaacagtcgaataacaagtacgcggcatcatcatatctctcattgacccctgaacagtggaagagccataggtcgtactcgtgtcgagtcacacacgagggatccaccgtagaaaagacagtggctcctgccgagtgttcctgataa

SEQ ID NO: 258 - protein, 214 aa, Artificial Sequence
  Description of Artificial Sequence: Synthetic polypeptide
SSELTQDPAVSVALGQTVRITCQGDSLRSYYASWYQQKPGQAPVLVIYGKNNRPSGIPDRFSGSSSGNTASLTITGAQAEDEADYYCESRDSPGNQWVFGGGTKVTVLGQPKAAPSVTLFPPSSEELQANKATLVCLVSDFYPGAVTVAWKADGSPVKVGVETTKPSKQSNNKYAASSYLSLTPEQWKSHRSYSCRVTHEGSTVEKTVAPAECS

SEQ ID NO: 259 - DNA, 648 bp, Artificial Sequence
  Description of Artificial Sequence: Synthetic polynucleotide
tcaagcgaattgacccaagaccccgcagtctccgtggcgcttgggcaaactgtgagaatcacgtgtcaaggagacagccttagaagctactatgcctcgtggtatcagcagaagccaggtcaggccccagtcctcgtgatctacgggaagaacaaccgcccctcgggtattcccgaccgcttttcgggatcgtcctccggaaatacggcttccctgacgatcaccggagcccaagcggaagatgaggcggattactattgcaactcacgggacacaccgggtgaccagtgggtattcgggggaggcactaaagtaacagtgctcggccagcctaaagcggcaccgtcggtgactctctttcccccgtcatcggaagagcttcaggcgaataaggcgacactggtatgcttggtcagcgatttctacccgggagccgtaacggtcgcgtggaaagcggacgggtcgcccgtgaaagtcggggtcgagacaacgaaaccctcaaaacagtcgaataacaagtacgcggcatcatcatatctctcattgacccctgaacagtggaagagccataggtcgtactcgtgtcgagtcacacacgagggatccaccgtagaaaagacagtggctcctgccgagtgttcctgataa

SEQ ID NO: 260 - protein, 214 aa, Artificial Sequence
  Description of Artificial Sequence: Synthetic polypeptide
SSELTQDPAVSVALGQTVRITCQGDSLRSYYASWYQQKPGQAPVLVIYGKNNRPSGIPDRFSGSSSGNTASLTITGAQAEDEADYYCNSRDTPGDQWVFGGGTKVTVLGQPKAAPSVTLFPPSSEELQANKATLVCLVSDFYPGAVTVAWKADGSPVKVGVETTKPSKQSNNKYAASSYLSLTPEQWKSHRSYSCRVTHEGSTVEKTVAPAECS

SEQ ID NO: 261 - DNA, 648 bp, Artificial Sequence
  Description of Artificial Sequence: Synthetic polynucleotide
tcaagcgaattgacccaagaccccgcagtctccgtggcgcttgggcaaactgtgagaatcacgtgtcaaggagacagccttagaagctactatgcctcgtggtatcagcagaagccaggtcaggccccagtcctcgtgatctacgggaagaacaaccgcccctcgggtattcccgaccgcttttcgggatcgtcctccggaaatacggcttccctgacgatcaccggagcccaagcggaagatgaggcggattactattgcaactcacgggacacgccgggtaacaagtgggtattcgggggaggcactaaagtaacagtgattggccagcctaaagcggcaccgtcggtgactctctttcccccgtcatcggaagagcttcaggcgaataaggcgacactggtatgcttggtcagcgatttctacccgggagccgtaacggtcgcgtggaaagcggacgggtcgcccgtgaaagtcggggtcgagacaacgaaaccctcaaaacagtcgaataacaagtacgcggcatcatcatatctctcattgacccctgaacagtggaagagccataggtcgtactcgtgtcgagtcacacacgagggatccaccgtagaaaagacagtggctcctgccgagtgttcctgataa

SEQ ID NO: 262 - protein, 214 aa, Artificial Sequence
  Description of Artificial Sequence: Synthetic polypeptide
SSELTQDPAVSVALGQTVRITCQGDSLRSYYASWYQQKPGQAPVLVIYGKNNRPSGIPDRFSGSSSGNTASLTITGAQAEDEADYYCNSRDTPGNKWVFGGGTKVTVIGQPKAAPSVTLFPPSSEELQANKATLVCLVSDFYPGAVTVAWKADGSPVKVGVETTKPSKQSNNKYAASSYLSLTPEQWKSHRSYSCRVTHEGSTVEKTVAPAECS

SEQ ID NO: 263 - DNA, 648 bp, Artificial Sequence
  Description of Artificial Sequence: Synthetic polynucleotide
tcaagcgaattgacccaagaccccgcagtctccgtggcgcttgggcaaactgtgagaatcacgtgtcaaggagacagccttagaagctactatgcctcgtggtatcagcagaagccaggtcaggccccagtcctcgtgatctacgggaagaacaaccgcccctcgggtattcccgaccgcttttcgggatcgtcctccggaaatacggcttccctgacgatcaccggagcccaagcggaagatgaggcggattactattgcaattcacgggacgtgccgggtgaccagtgggtattcgggggaggcactaaagtaacagtgctcggccagcctaaagcggcaccgtcggtgactctctttcccccgtcatcggaagagcttcaggcgaataaggcgacactggtatgcttggtcagcgatttctacccgggagccgtaacggtcgcgtggaaagcggacgggtcgcccgtgaaagtcggggtcgagacaacgaaaccctcaaaacagtcgaataacaagtacgcggcatcatcatatctctcattgacccctgaacagtggaagagccataggtcgtactcgtgtcgagtcacacacgagggatccaccgtagaaaagacagtggctcctgccgagtgttcctgataa

SEQ ID NO: 264 - protein, 214 aa, Artificial Sequence
  Description of Artificial Sequence: Synthetic polypeptide
SSELTQDPAVSVALGQTVRITCQGDSLRSYYASWYQQKPGQAPVLVIYGKNNRPSGIPDRFSGSSSGNTASLTITGAQAEDEADYYCNSRDVPGDQWVFGGGTKVTVLGQPKAAPSVTLFPPSSEELQANKATLVCLVSDFYPGAVTVAWKADGSPVKVGVETTKPSKQSNNKYAASSYLSLTPEQWKSHRSYSCRVTHEGSTVEKTVAPAECS

SEQ ID NO: 265 - DNA, 648 bp, Artificial Sequence
  Description of Artificial Sequence: Synthetic polynucleotide
tcaagcgaattgacccaagaccccgcagtctccgtggcgcttgggcaaactgtgagaatcacgtgtcaaggagacagccttagaagctactatgcctcgtggtatcagcagaagccaggtcaggccccagtcctcgtgatctacgggaagaacaaccgcccctcgggtattcccgaccgcttttcgggatcgtcctccggaaatacggcttccctgacgatcaccggagcccaagcggaagatgaggcggattactattgcaattcacgggactggccgggtaaccagtgggtattcgggggaggcactaaagtaacagtgctcggccagcctaaagcggcaccgtcggtgactctctttcccccgtcatcggaagagcttcaggcgaataaggcgacactggtatgcttggtcagcgatttctacccgggagccgtaacggtcgcgtggaaagcggacgggtcgcccgtgaaagtcggggtcgagacaacgaaaccctcaaaacagtcgaataacaagtacgcggcatcatcatatctctcattgacccctgaacagtggaagagccataggtcgtactcgtgtcgagtcacacacgagggatccaccgtagaaaagacagtggctcctgccgagtgttcctgataa

SEQ ID NO: 266 - protein, 214 aa, Artificial Sequence
  Description of Artificial Sequence: Synthetic polypeptide
SSELTQDPAVSVALGQTVRITCQGDSLRSYYASWYQQKPGQAPVLVIYGKNNRPSGIPDRFSGSSSGNTASLTITGAQAEDEADYYCNSRDWPGNQWVFGGGTKVTVLGQPKAAPSVTLFPPSSEELQANKATLVCLVSDFYPGAVTVAWKADGSPVKVGVETTKPSKQSNNKYAASSYLSLTPEQWKSHRSYSCRVTHEGSTVEKTVAPAECS

SEQ ID NO: 267 - DNA, 2166 bp, Artificial Sequence
  Description of Artificial Sequence: Synthetic polynucleotide
gaggtccagctcgtcgagtcaggtggaggactggtgcaacccggtcgatcacttcggctgtcgtgtgcggcatcgggattcacgtttgacgattatgccatgcattgggtgcgacaagctccgggcaaagggcttgaatgggtgtccggaatctcgtgggattcggggtcaacgggctatgccgattccgtaaagggtaggttcaccatctcacgcgacaatgcgaagaattcgttgtatcttcagatgaattcgcttagggcagaagatacggccttgtactattgcgcaagggaccttggggcgtaccagtgggtcgagggtttcgattactggggtcagggaaccctggtaacggtgtcgagcgctagcactaagggaccgtccgtgtttcccctcgcgcctagctcgaagagcacatcgggaggaacagcggcgctcggctgtctcgtcaaagactacttccccgagccggtgaccgtgagctggaattccggagcgttgacctcaggggtgcatacattccctgccgtactgcaatcatcagggctctactcattgtcgagcgtagtgactgtaccgtcgtcatcgctcggaacgcagacgtacatctgcaatgtcaatcacaagccctccaatactaaggtagataagaaagtagaaccgaagtcgtgtgataagacccatacatgccctccgtgccccgcaccggaactcttgggtggcccatcagtctttctgttcccgccaaagcccaaagacacactgatgatttcgcgcacgcccgaagtcacttgcgtcgtggtggatgtgtcgcatgaggacccggaggtcaagttcaactggtacgtcgatggtgtagaagtccacaacgccaagaccaagcctcgggaggagcagtataactccacctaccgggtagtgagcgtgcttacagtgctccatcaggactggctgaacggcaaagaatacaaatgcaaagtcagcaacaaagcgctgccagcgcccatcgagaaaacaattagcaaagcgaaagggcagcccagagaacctcaagtgtatacattgccgccgtcgcgggaggaaatgacaaagaatcaggtatccctgacgtgtcttgtgaaaggcttttacccatccgacattgcggtagagtgggagtcgaatgggcaacccgagaacaactataagacgactcccccagtcttggattcagacggatcctttttcttgtactcgaaactcacagtcgacaagtccagatggcagcaggggaacgtgttcagctgcagcgtgatgcacgaggcccttcacaaccactatacgcagaaatcattaagcttatcgccgggtggtgggggaggtagcgggggtggagggtccggaggtgggggaagcgaagtgcaacttctccagtccggagggggcctcgtacaacccggagggtcattgaggctgtcatgtgcagcgtcggggttcatgttttcacggtatcccatgcactgggtgcgacaggcgccagggaaaggcctcgaatgggtaggatccatttcgggatcgggcggtgcaactccctacgccgacagcgtgaagggaaggtttaccatctcacgcgataactcgaaaaacacgctgtacttgcagatgaattcgctgagggcggaagatacggcggtctactattgcgctaaggacttctaccagattttgacaggaaatgcctttgattactggggtcagggcacgacagtaacagtgtcatcggcgtcgacagggggagggggctcgggaggaggcgggtcaggtggagggggatcgggtggcggaggatccgatattcagatgacccagtccccgtccagccttagcgcgagcctgggcgaccgggtcactatcacgtgtcgggcatcccagggtatctcgtcatatctggcgtggtatcaacagaagcctggtaaagccccgaagttgcttatctacgccaagtcaaccctccagtcgggggtccccagcagattttcggggtcgggaagcggaacggacttcacgctcaccatctcaagcctccagccagaggattcagctacgtactattgccaacagtactggacgttccctcttacattcgggggtgggacaaaagtggagattaagagaacttgataa

SEQ ID NO: 268 - protein, 720 aa, Artificial Sequence
  Description of Artificial Sequence: Synthetic polypeptide
EVQLVESGGGLVQPGRSLRLSCAASGFTFDDYAMHWVRQAPGKGLEWVSGISWDSGSTGYADSVKGRFTISRDNAKNSLYLQMNSLRAEDTALYYCARDLGAYQWVEGFDYWGQGTLVTVSSASTKGPSVFPLAPSSKSTSGGTAALGCLVKDYFPEPVTVSWNSGALTSGVHTFPAVLQSSGLYSLSSVVTVPSSSLGTQTYICNVNHKPSNTKVDKKVEPKSCDKTHTCPPCPAPELLGGPSVFLFPPKPKDTLMISRTPEVTCVVVDVSHEDPEVKFNWYVDGVEVHNAKTKPREEQYNSTYRVVSVLTVLHQDWLNGKEYKCKVSNKALPAPIEKTISKAKGQPREPQVYTLPPSREEMTKNQVSLTCLVKGFYPSDIAVEWESNGQPENNYKTTPPVLDSDGSFFLYSKLTVDKSRWQQGNVFSCSVMHEALHNHYTQKSLSLSPGGGGGSGGGGSGGGGSEVQLLQSGGGLVQPGGSLRLSCAASGFMFSRYPMHWVRQAPGKGLEWVGSISGSGGATPYADSVKGRFTISRDNSKNTLYLQMNSLRAEDTAVYYCAKDFYQILTGNAFDYWGQGTTVTVSSASTGGGGSGGGGSGGGGSGGGGSDIQMTQSPSSLSASLGDRVTITCRASQGISSYLAWYQQKPGKAPKLLIYAKSTLQSGVPSRFSGSGSGTDFTLTISSLQPEDSATYYCQQYWTFPLTFGGGTKVEIKRT

SEQ ID NO: 269 - DNA, 2166 bp, Artificial Sequence
  Description of Artificial Sequence: Synthetic polynucleotide
gaggtccagctcgtcgagtcaggtggaggactggtgcaacccggtcgatcacttcggctgtcgtgtgcggcatcgggattcacgtttgacgattatgccatgcattgggtgcgacaagctccgggcaaagggcttgaatgggtgtccggaatctcgtgggattcggggtcaacgggctatgccgattccgtaaagggtaggttcaccatctcacgcgacaatgcgaagaattcgttgtatcttcagatgaattcgcttagggcagaagatacggccttgtactattgcgcaagggaccttggggcgtaccagtgggtcgagggtttcgattactggggtcagggaaccctggtaacggtgtcgagcgctagcactaagggaccgtccgtgtttcccctcgcgcctagctcgaagagcacatcgggaggaacagcggcgctcggctgtctcgtcaaagactacttccccgagccggtgaccgtgagctggaattccggagcgttgacctcaggggtgcatacattccctgccgtactgcaatcatcagggctctactcattgtcgagcgtagtgactgtaccgtcgtcatcgctcggaacgcagacgtacatctgcaatgtcaatcacaagccctccaatactaaggtagataagaaagtagaaccgaagtcgtgtgataagacccatacatgccctccgtgccccgcaccggaactcttgggtggcccatcagtctttctgttcccgccaaagcccaaagacacactgatgatttcgcgcacgcccgaagtcacttgcgtcgtggtggatgtgtcgcatgaggacccggaggtcaagttcaactggtacgtcgatggtgtagaagtccacaacgccaagaccaagcctcgggaggagcagtataactccacctaccgggtagtgagcgtgcttacagtgctccatcaggactggctgaacggcaaagaatacaaatgcaaagtcagcaacaaagcgctgccagcgcccatcgagaaaacaattagcaaagcgaaagggcagcccagagaacctcaagtgtatacattgccgccgtcgcgggaggaaatgacaaagaatcaggtatccctgacgtgtcttgtgaaaggcttttacccatccgacattgcggtagagtgggagtcgaatgggcaacccgagaacaactataagacgactcccccagtcttggattcagacggatcctttttcttgtactcgaaactcacagtcgacaagtccagatggcagcaggggaacgtgttcagctgcagcgtgatgcacgaggcccttcacaaccactatacgcagaaatcattaagcttatcgcccggtggaggagggggttccggtggtggtgggtcgggaggaggaggctcggaggtgcagcttctgcagtcgggtggagggctcgtgcagccaggcggctcacttcgcctttcatgcgcggcatcaggctttttcttcagcaagtatcccatgcattgggtcagacaagcaccggggaagggattggaatgggtcagctcaatttcgtcggatgggggagccacagtatacgcggactccgtaaaagggcgattcacaatttcccgcgacaattccaaaaacacgctgtatctccaaatgaactcgcttagggctgaagataccgccgtctactactgtgcgaaggacttttacacttggttgactggtaatgcgttcgattcatgggggcagggcacaagcgtgacagtatcgtccgcctcaacgggaggtggaggtagcggaggcggagggtcgggcggtggtggaagcgggggaggagggagcgacatccagctgacgcagtcaccctcatcgctgtccgcgtcattgggagatcgggtgacgattacttgcagagcatcgcagggaatctcctcgtacctcgcctggtatcaacaaaaacccgggaaagcaccgaaacttctcatctacgcgagatcgacgcgccagagcggagtacctagcaggttctccgggtcgggaagcgggacagagtttaccctcacaatctcgtcattgcagccggaggactcggctacgtactattgtcagcagtattggacctggcctttgacttttggcggagggacgaaggtggagatcaagcggacatgataa

SEQ ID NO: 270 - protein, 720 aa, Artificial Sequence
  Description of Artificial Sequence: Synthetic polypeptide
EVQLVESGGGLVQPGRSLRLSCAASGFTFDDYAMHWVRQAPGKGLEWVSGISWDSGSTGYADSVKGRFTISRDNAKNSLYLQMNSLRAEDTALYYCARDLGAYQWVEGFDYWGQGTLVTVSSASTKGPSVFPLAPSSKSTSGGTAALGCLVKDYFPEPVTVSWNSGALTSGVHTFPAVLQSSGLYSLSSVVTVPSSSLGTQTYICNVNHKPSNTKVDKKVEPKSCDKTHTCPPCPAPELLGGPSVFLFPPKPKDTLMISRTPEVTCVVVDVSHEDPEVKFNWYVDGVEVHNAKTKPREEQYNSTYRVVSVLTVLHQDWLNGKEYKCKVSNKALPAPIEKTISKAKGQPREPQVYTLPPSREEMTKNQVSLTCLVKGFYPSDIAVEWESNGQPENNYKTTPPVLDSDGSFFLYSKLTVDKSRWQQGNVFSCSVMHEALHNHYTQKSLSLSPGGGGGSGGGGSGGGGSEVQLLQSGGGLVQPGGSLRLSCAASGFFFSKYPMHWVRQAPGKGLEWVSSISSDGGATVYADSVKGRFTISRDNSKNTLYLQMNSLRAEDTAVYYCAKDFYTWLTGNAFDSWGQGTSVTVSSASTGGGGSGGGGSGGGGSGGGGSDIQLTQSPSSLSASLGDRVTITCRASQGISSYLAWYQQKPGKAPKLLIYARSTRQSGVPSRFSGSGSGTEFTLTISSLQPEDSATYYCQQYWTWPLTFGGGTKVEIKRT

SEQ ID NO: 271 - DNA, 2166 bp, Artificial Sequence
  Description of Artificial Sequence: Synthetic polynucleotide
gaggtccagctcgtcgagtcaggtggaggactggtgcaacccggtcgatcacttcggctgtcgtgtgcggcatcgggattcacgtttgacgattatgccatgcattgggtgcgacaagctccgggcaaagggcttgaatgggtgtccggaatctcgtgggattcggggtcaacgggctatgccgattccgtaaagggtaggttcaccatctcacgcgacaatgcgaagaattcgttgtatcttcagatgaattcgcttagggcagaagatacggccttgtactattgcgcaagggaccttggggcgtaccagtgggtcgagggtttcgattactggggtcagggaaccctggtaacggtgtcgagcgctagcactaagggaccgtccgtgtttcccctcgcgcctagctcgaagagcacatcgggaggaacagcggcgctcggctgtctcgtcaaagactacttccccgagccggtgaccgtgagctggaattccggagcgttgacctcaggggtgcatacattccctgccgtactgcaatcatcagggctctactcattgtcgagcgtagtgactgtaccgtcgtcatcgctcggaacgcagacgtacatctgcaatgtcaatcacaagccctccaatactaaggtagataagaaagtagaaccgaagtcgtgtgataagacccatacatgccctccgtgccccgcaccggaactcttgggtggcccatcagtctttctgttcccgccaaagcccaaagacacactgatgatttcgcgcacgcccgaagtcacttgcgtcgtggtggatgtgtcgcatgaggacccggaggtcaagttcaactggtacgtcgatggtgtagaagtccacaacgccaagaccaagcctcgggaggagcagtataactccacctaccgggtagtgagcgtgcttacagtgctccatcaggactggctgaacggcaaagaatacaaatgcaaagtcagcaacaaagcgctgccagcgcccatcgagaaaacaattagcaaagcgaaagggcagcccagagaacctcaagtgtatacattgccgccgtcgcgggaggaaatgacaaagaatcaggtatccctgacgtgtcttgtgaaaggcttttacccatccgacattgcggtagagtgggagtcgaatgggcaacccgagaacaactataagacgactcccccagtcttggattcagacggatcctttttcttgtactcgaaactcacagtcgacaagtccagatggcagcaggggaacgtgttcagctgcagcgtgatgcacgaggcccttcacaaccactatacgcagaaatcattaagcttatcgcccggaggaggtgggggttccgggggtgggggatccggtggaggagggtccgaggtccaactgctgcagtccggcggagggctcgtgcagcctggcggtagcctgagactttcgtgtgcggccagcgggtttgacttttcatcatatcccatgcactgggtgagacaagctccggggaaaggtcttgaatgggtcggctccatttcgtcatcgggtggtgcgaccccgtacgccgattcggtgaagggacgattcaccatctcgcgggataactcgaagaacactctttatctccagatgaattcgctgaggcccgaagatacggcagtgtattactgtgcgaaagacttctatacgattttgactggcaatgcattcgacatgtggggccagggaacgtcggtaacagtctcaagcgcatcaacaggtggtggagggtcgggaggaggaggaagcggtgggggagggtcagggggaggcggatcggacatccagatgacccagtccccttcctcgctctccgcgtccttgggtgaccgcgtaacgatcacatgcagagcaagccaaggaatttcaagctatcttgcgtggtatcagcagaagccgggtaaagcgcccaagttgttgatctacgccagctccacaaggcagtcgggggtcccctcacgcttttcggggtcgggctcgggaactgacttcaccttgacgatctccagcctccagccagaggattcagggacctactactgccaacagtactgggcgtttcccctgacattcggagggggaacaaaagtagagatcaagcggacgtgataa

SEQ ID NO: 272 - protein, 720 aa, Artificial Sequence
  Description of Artificial Sequence: Synthetic polypeptide
EVQLVESGGGLVQPGRSLRLSCAASGFTFDDYAMHWVRQAPGKGLEWVSGISWDSGSTGYADSVKGRFTISRDNAKNSLYLQMNSLRAEDTALYYCARDLGAYQWVEGFDYWGQGTLVTVSSASTKGPSVFPLAPSSKSTSGGTAALGCLVKDYFPEPVTVSWNSGALTSGVHTFPAVLQSSGLYSLSSVVTVPSSSLGTQTYICNVNHKPSNTKVDKKVEPKSCDKTHTCPPCPAPELLGGPSVFLFPPKPKDTLMISRTPEVTCVVVDVSHEDPEVKFNWYVDGVEVHNAKTKPREEQYNSTYRVVSVLTVLHQDWLNGKEYKCKVSNKALPAPIEKTISKAKGQPREPQVYTLPPSREEMTKNQVSLTCLVKGFYPSDIAVEWESNGQPENNYKTTPPVLDSDGSFFLYSKLTVDKSRWQQGNVFSCSVMHEALHNHYTQKSLSLSPGGGGGSGGGGSGGGGSEVQLLQSGGGLVQPGGSLRLSCAASGFDFSSYPMHWVRQAPGKGLEWVGSISSSGGATPYADSVKGRFTISRDNSKNTLYLQMNSLRPEDTAVYYCAKDFYTILTGNAFDMWGQGTSVTVSSASTGGGGSGGGGSGGGGSGGGGSDIQMTQSPSSLSASLGDRVTITCRASQGISSYLAWYQQKPGKAPKLLIYASSTRQSGVPSRFSGSGSGTDFTLTISSLQPEDSGTYYCQQYWAFPLTFGGGTKVEIKRT

SEQ ID NO: 273 - DNA, 2166 bp, Artificial Sequence
  Description of Artificial Sequence: Synthetic polynucleotide
gaggtccagctcgtcgagtcaggtggaggactggtgcaacccggtcgatcacttcggctgtcgtgtgcggcatcgggattcacgtttgacgattatgccatgcattgggtgcgacaagctccgggcaaagggcttgaatgggtgtccggaatctcgtggaactcggggtcaacgggctatgccgattccgtaaagggtaggttcaccatctcacgcgacaatgcgaagaattcgttgtaccttcaaatgaattcgcttagggcagaagatacggccttgtactattgcgcaagggaccttgggttcaaccagtgggtcgacggtttcgattactggggtcagggaaccctggtaacggtgtcgagcgctagcactaagggaccgtccgtgtttcccctcgcgcctagctcgaagagcacatcgggaggaacagcggcgctcggctgtctcgtcaaagactacttccccgagccggtgaccgtgagctggaattccggagcgttgacctcaggggtgcatacattccctgccgtactgcaatcatcagggctctactcattgtcgagcgtagtgactgtaccgtcgtcatcgctcggaacgcagacgtacatctgcaatgtcaatcacaagccctccaatactaaggtagataagaaagtagaaccgaagtcgtgtgataagacccatacatgccctccgtgccccgcaccggaactcttgggtggcccatcagtctttctgttcccgccaaagcccaaagacacactgatgatttcgcgcacgcccgaagtcacttgcgtcgtggtggatgtgtcgcatgaggacccggaggtcaagttcaactggtacgtcgatggtgtagaagtccacaacgccaagaccaagcctcgggaggagcagtataactccacctaccgggtagtgagcgtgcttacagtgctccatcaggactggctgaacggcaaagaatacaaatgcaaagtcagcaacaaagcgctgccagcgcccatcgagaaaacaattagcaaagcgaaagggcagcccagagaacctcaagtgtatacattgccgccgtcgcgggaggaaatgacaaagaatcaggtatccctgacgtgtcttgtgaaaggcttttacccatccgacattgcggtagagtgggagtcgaatgggcaacccgagaacaactataagacgactcccccagtcttggattcagacggatcctttttcttgtactcgaaactcacagtcgacaagtccagatggcagcaggggaacgtgttcagctgcagcgtgatgcacgaggcccttcacaaccactatacgcagaaatcattaagcttatcgccgggtggtgggggaggtagcgggggtggagggtccggaggtgggggaagcgaagtgcaacttctccagtccggagggggcctcgtacaacccggagggtcattgaggctgtcatgtgcagcgtcggggttcatgttttcacggtatcccatgcactgggtgcgacaggcgccagggaaaggcctcgaatgggtaggatccatttcgggatcgggcggtgcaactccctacgccgacagcgtgaagggaaggtttaccatctcacgcgataactcgaaaaacacgctgtacttgcagatgaattcgctgagggcggaagatacggcggtctactattgcgctaaggacttctaccagattttgacaggaaatgcctttgattactggggtcagggcacgacagtaacagtgtcatcggcgtcgacagggggagggggctcgggaggaggcgggtcaggtggagggggatcgggtggcggaggatccgatattcagatgacccagtccccgtccagccttagcgcgagcctgggcgaccgggtcactatcacgtgtcgggcatcccagggtatctcgtcatatctggcgtggtatcaacagaagcctggtaaagccccgaagttgcttatctacgccaagtcaaccctccagtcgggggtccccagcagattttcggggtcgggaagcggaacggacttcacgctcaccatctcaagcctccagccagaggattcagctacgtactattgccaacagtactggacgttccctcttacattcgggggtgggacaaaagtggagattaagagaacttgataa

SEQ ID NO: 274 - protein, 720 aa, Artificial Sequence
  Description of Artificial Sequence: Synthetic polypeptide
EVQLVESGGGLVQPGRSLRLSCAASGFTFDDYAMHWVRQAPGKGLEWVSGISWNSGSTGYADSVKGRFTISRDNAKNSLYLQMNSLRAEDTALYYCARDLGFNQWVDGFDYWGQGTLVTVSSASTKGPSVFPLAPSSKSTSGGTAALGCLVKDYFPEPVTVSWNSGALTSGVHTFPAVLQSSGLYSLSSVVTVPSSSLGTQTYICNVNHKPSNTKVDKKVEPKSCDKTHTCPPCPAPELLGGPSVFLFPPKPKDTLMISRTPEVTCVVVDVSHEDPEVKFNWYVDGVEVHNAKTKPREEQYNSTYRVVSVLTVLHQDWLNGKEYKCKVSNKALPAPIEKTISKAKGQPREPQVYTLPPSREEMTKNQVSLTCLVKGFYPSDIAVEWESNGQPENNYKTTPPVLDSDGSFFLYSKLTVDKSRWQQGNVFSCSVMHEALHNHYTQKSLSLSPGGGGGSGGGGSGGGGSEVQLLQSGGGLVQPGGSLRLSCAASGFMFSRYPMHWVRQAPGKGLEWVGSISGSGGATPYADSVKGRFTISRDNSKNTLYLQMNSLRAEDTAVYYCAKDFYQILTGNAFDYWGQGTTVTVSSASTGGGGSGGGGSGGGGSGGGGSDIQMTQSPSSLSASLGDRVTITCRASQGISSYLAWYQQKPGKAPKLLIYAKSTLQSGVPSRFSGSGSGTDFTLTISSLQPEDSATYYCQQYWTFPLTFGGGTKVEIKRT

SEQ ID NO: 275 - DNA, 2166 bp, Artificial Sequence
  Description of Artificial Sequence: Synthetic polynucleotide
gaggtccagctcgtcgagtcaggtggaggactggtgcaacccggtcgatcacttcggctgtcgtgtgcggcatcgggattcacgtttgacgattatgccatgcattgggtgcgacaagctccgggcaaagggcttgaatgggtgtccggaatctcgtggaactcggggtcaacgggctatgccgattccgtaaagggtaggttcaccatctcacgcgacaatgcgaagaattcgttgtaccttcaaatgaattcgcttagggcagaagatacggccttgtactattgcgcaagggaccttgggttcaaccagtgggtcgacggtttcgattactggggtcagggaaccctggtaacggtgtcgagcgctagcactaagggaccgtccgtgtttcccctcgcgcctagctcgaagagcacatcgggaggaacagcggcgctcggctgtctcgtcaaagactacttccccgagccggtgaccgtgagctggaattccggagcgttgacctcaggggtgcatacattccctgccgtactgcaatcatcagggctctactcattgtcgagcgtagtgactgtaccgtcgtcatcgctcggaacgcagacgtacatctgcaatgtcaatcacaagccctccaatactaaggtagataagaaagtagaaccgaagtcgtgtgataagacccatacatgccctccgtgccccgcaccggaactcttgggtggcccatcagtctttctgttcccgccaaagcccaaagacacactgatgatttcgcgcacgcccgaagtcacttgcgtcgtggtggatgtgtcgcatgaggacccggaggtcaagttcaactggtacgtcgatggtgtagaagtccacaacgccaagaccaagcctcgggaggagcagtataactccacctaccgggtagtgagcgtgcttacagtgctccatcaggactggctgaacggcaaagaatacaaatgcaaagtcagcaacaaagcgctgccagcgcccatcgagaaaacaattagcaaagcgaaagggcagcccagagaacctcaagtgtatacattgccgccgtcgcgggaggaaatgacaaagaatcaggtatccctgacgtgtcttgtgaaaggcttttacccatccgacattgcggtagagtgggagtcgaatgggcaacccgagaacaactataagacgactcccccagtcttggattcagacggatcctttttcttgtactcgaaactcacagtcgacaagtccagatggcagcaggggaacgtgttcagctgcagcgtgatgcacgaggcccttcacaaccactatacgcagaaatcattaagcttatcgcccggtggaggagggggttccggtggtggtgggtcgggaggaggaggctcggaggtgcagcttctgcagtcgggtggagggctcgtgcagccaggcggctcacttcgcctttcatgcgcggcatcaggctttttcttcagcaagtatcccatgcattgggtcagacaagcaccggggaagggattggaatgggtcagctcaatttcgtcggatgggggagccacagtatacgcggactccgtaaaagggcgattcacaatttcccgcgacaattccaaaaacacgctgtatctccaaatgaactcgcttagggctgaagataccgccgtctactactgtgcgaaggacttttacacttggttgactggtaatgcgttcgattcatgggggcagggcacaagcgtgacagtatcgtccgcctcaacgggaggtggaggtagcggaggcggagggtcgggcggtggtggaagcgggggaggagggagcgacatccagctgacgcagtcaccctcatcgctgtccgcgtcattgggagatcgggtgacgattacttgcagagcatcgcagggaatctcctcgtacctcgcctggtatcaacaaaaacccgggaaagcaccgaaacttctcatctacgcgagatcgacgcgccagagcggagtacctagcaggttctccgggtcgggaagcgggacagagtttaccctcacaatctcgtcattgcagccggaggactcggctacgtactattgtcagcagtattggacctggcctttgacttttggcggagggacgaaggtggagatcaagcggacatgataa

SEQ ID NO: 276 - protein, 720 aa, Artificial Sequence
  Description of Artificial Sequence: Synthetic polypeptide
EVQLVESGGGLVQPGRSLRLSCAASGFTFDDYAMHWVRQAPGKGLEWVSGISWNSGSTGYADSVKGRFTISRDNAKNSLYLQMNSLRAEDTALYYCARDLGFNQWVDGFDYWGQGTLVTVSSASTKGPSVFPLAPSSKSTSGGTAALGCLVKDYFPEPVTVSWNSGALTSGVHTFPAVLQSSGLYSLSSVVTVPSSSLGTQTYICNVNHKPSNTKVDKKVEPKSCDKTHTCPPCPAPELLGGPSVFLFPPKPKDTLMISRTPEVTCVVVDVSHEDPEVKFNWYVDGVEVHNAKTKPREEQYNSTYRVVSVLTVLHQDWLNGKEYKCKVSNKALPAPIEKTISKAKGQPREPQVYTLPPSREEMTKNQVSLTCLVKGFYPSDIAVEWESNGQPENNYKTTPPVLDSDGSFFLYSKLTVDKSRWQQGNVFSCSVMHEALHNHYTQKSLSLSPGGGGGSGGGGSGGGGSEVQLLQSGGGLVQPGGSLRLSCAASGFFFSKYPMHWVRQAPGKGLEWVSSISSDGGATVYADSVKGRFTISRDNSKNTLYLQMNSLRAEDTAVYYCAKDFYTWLTGNAFDSWGQGTSVTVSSASTGGGGSGGGGSGGGGSGGGGSDIQLTQSPSSLSASLGDRVTITCRASQGISSYLAWYQQKPGKAPKLLIYARSTRQSGVPSRFSGSGSGTEFTLTISSLQPEDSATYYCQQYWTWPLTFGGGTKVEIKRT

SEQ ID NO: 277 - DNA, 2166 bp, Artificial Sequence
  Description of Artificial Sequence: Synthetic polynucleotide
gaggtccagctcgtcgagtcaggtggaggactggtgcaacccggtcgatcacttcggctgtcgtgtgcggcatcgggattcacgtttgacgattatgccatgcattgggtgcgacaagctccgggcaaagggcttgaatgggtgtccggaatctcgtggaactcggggtcaacgggctatgccgattccgtaaagggtaggttcaccatctcacgcgacaatgcgaagaattcgttgtaccttcaaatgaattcgcttagggcagaagatacggccttgtactattgcgcaagggaccttgggttcaaccagtgggtcgacggtttcgattactggggtcagggaaccctggtaacggtgtcgagcgctagcactaagggaccgtccgtgtttcccctcgcgcctagctcgaagagcacatcgggaggaacagcggcgctcggctgtctcgtcaaagactacttccccgagccggtgaccgtgagctggaattccggagcgttgacctcaggggtgcatacattccctgccgtactgcaatcatcagggctctactcattgtcgagcgtagtgactgtaccgtcgtcatcgctcggaacgcagacgtacatctgcaatgtcaatcacaagccctccaatactaaggtagataagaaagtagaaccgaagtcgtgtgataagacccatacatgccctccgtgccccgcaccggaactcttgggtggcccatcagtctttctgttcccgccaaagcccaaagacacactgatgatttcgcgcacgcccgaagtcacttgcgtcgtggtggatgtgtcgcatgaggacccggaggtcaagttcaactggtacgtcgatggtgtagaagtccacaacgccaagaccaagcctcgggaggagcagtataactccacctaccgggtagtgagcgtgcttacagtgctccatcaggactggctgaacggcaaagaatacaaatgcaaagtcagcaacaaagcgctgccagcgcccatcgagaaaacaattagcaaagcgaaagggcagcccagagaacctcaagtgtatacattgccgccgtcgcgggaggaaatgacaaagaatcaggtatccctgacgtgtcttgtgaaaggcttttacccatccgacattgcggtagagtgggagtcgaatgggcaacccgagaacaactataagacgactcccccagtcttggattcagacggatcctttttcttgtactcgaaactcacagtcgacaagtccagatggcagcaggggaacgtgttcagctgcagcgtgatgcacgaggcccttcacaaccactatacgcagaaatcattaagcttatcgcccggaggaggtgggggttccgggggtgggggatccggtggaggagggtccgaggtccaactgctgcagtccggcggagggctcgtgcagcctggcggtagcctgagactttcgtgtgcggccagcgggtttgacttttcatcatatcccatgcactgggtgagacaagctccggggaaaggtcttgaatgggtcggctccatttcgtcatcgggtggtgcgaccccgtacgccgattcggtgaagggacgattcaccatctcgcgggataactcgaagaacactctttatctccagatgaattcgctgaggcccgaagatacggcagtgtattactgtgcgaaagacttctatacgattttgactggcaatgcattcgacatgtggggccagggaacgtcggtaacagtctcaagcgcatcaacaggtggtggagggtcgggaggaggaggaagcggtgggggagggtcagggggaggcggatcggacatccagatgacccagtccccttcctcgctctccgcgtccttgggtgaccgcgtaacgatcacatgcagagcaagccaaggaatttcaagctatcttgcgtggtatcagcagaagccgggtaaagcgcccaagttgttgatctacgccagctccacaaggcagtcgggggtcccctcacgcttttcggggtcgggctcgggaactgacttcaccttgacgatctccagcctccagccagaggattcagggacctactactgccaacagtactgggcgtttcccctgacattcggagggggaacaaaagtagagatcaagcggacgtgataa

SEQ ID NO: 278 - protein, 720 aa, Artificial Sequence
  Description of Artificial Sequence: Synthetic polypeptide
EVQLVESGGGLVQPGRSLRLSCAASGFTFDDYAMHWVRQAPGKGLEWVSGISWNSGSTGYADSVKGRFTISRDNAKNSLYLQMNSLRAEDTALYYCARDLGFNQWVDGFDYWGQGTLVTVSSASTKGPSVFPLAPSSKSTSGGTAALGCLVKDYFPEPVTVSWNSGALTSGVHTFPAVLQSSGLYSLSSVVTVPSSSLGTQTYICNVNHKPSNTKVDKKVEPKSCDKTHTCPPCPAPELLGGPSVFLFPPKPKDTLMISRTPEVTCVVVDVSHEDPEVKFNWYVDGVEVHNAKTKPREEQYNSTYRVVSVLTVLHQDWLNGKEYKCKVSNKALPAPIEKTISKAKGQPREPQVYTLPPSREEMTKNQVSLTCLVKGFYPSDIAVEWESNGQPENNYKTTPPVLDSDGSFFLYSKLTVDKSRWQQGNVFSCSVMHEALHNHYTQKSLSLSPGGGGGSGGGGSGGGGSEVQLLQSGGGLVQPGGSLRLSCAASGFDFSSYPMHWVRQAPGKGLEWVGSISSSGGATPYADSVKGRFTISRDNSKNTLYLQMNSLRPEDTAVYYCAKDFYTILTGNAFDMWGQGTSVTVSSASTGGGGSGGGGSGGGGSGGGGSDIQMTQSPSSLSASLGDRVTITCRASQGISSYLAWYQQKPGKAPKLLIYASSTRQSGVPSRFSGSGSGTDFTLTISSLQPEDSGTYYCQQYWAFPLTFGGGTKVEIKRT

SEQ ID NO: 279 - DNA, 2166 bp, Artificial Sequence
  Description of Artificial Sequence: Synthetic polynucleotide
gaggtccagctcgtcgagtcaggtggaggactggtgcaacccggtcgatcacttcggctgtcgtgtgcggcatcgggattcacgtttgacgattatgccatgcattgggtgcgacaagctccgggcaaagggcttgaatgggtgtccggaatctcgtgggattcggggtcagtgggctatgccgattccgtaaagggtaggttcaccatctcacgcgacaatgcgaagaattcgttgtacctccaaatgaattcgcttagggcagaagatacggccttgtactattgcgcaagggaccttgggtacaaccagtggtgggaaggtttcgattactggggtcagggaaccctggtaacggtgtcgagcgctagcactaagggaccgtccgtgtttcccctcgcgcctagctcgaagagcacatcgggaggaacagcggcgctcggctgtctcgtcaaagactacttccccgagccggtgaccgtgagctggaattccggagcgttgacctcaggggtgcatacattccctgccgtactgcaatcatcagggctctactcattgtcgagcgtagtgactgtaccgtcgtcatcgctcggaacgcagacgtacatctgcaatgtcaatcacaagccctccaatactaaggtagataagaaagtagaaccgaagtcgtgtgataagacccatacatgccctccgtgccccgcaccggaactcttgggtggcccatcagtctttctgttcccgccaaagcccaaagacacactgatgatttcgcgcacgcccgaagtcacttgcgtcgtggtggatgtgtcgcatgaggacccggaggtcaagttcaactggtacgtcgatggtgtagaagtccacaacgccaagaccaagcctcgggaggagcagtataactccacctaccgggtagtgagcgtgcttacagtgctccatcaggactggctgaacggcaaagaatacaaatgcaaagtcagcaacaaagcgctgccagcgcccatcgagaaaacaattagcaaagcgaaagggcagcccagagaacctcaagtgtatacattgccgccgtcgcgggaggaaatgacaaagaatcaggtatccctgacgtgtcttgtgaaaggcttttacccatccgacattgcggtagagtgggagtcgaatgggcaacccgagaacaactataagacgactcccccagtcttggattcagacggatcctttttcttgtactcgaaactcacagtcgacaagtccagatggcagcaggggaacgtgttcagctgcagcgtgatgcacgaggcccttcacaaccactatacgcagaaatcattaagcttatcgccgggtggtgggggaggtagcgggggtggagggtccggaggtgggggaagcgaagtgcaacttctccagtccggagggggcctcgtacaacccggagggtcattgaggctgtcatgtgcagcgtcggggttcatgttttcacggtatcccatgcactgggtgcgacaggcgccagggaaaggcctcgaatgggtaggatccatttcgggatcgggcggtgcaactccctacgccgacagcgtgaagggaaggtttaccatctcacgcgataactcgaaaaacacgctgtacttgcagatgaattcgctgagggcggaagatacggcggtctactattgcgctaaggacttctaccagattttgacaggaaatgcctttgattactggggtcagggcacgacagtaacagtgtcatcggcgtcgacagggggagggggctcgggaggaggcgggtcaggtggagggggatcgggtggcggaggatccgatattcagatgacccagtccccgtccagccttagcgcgagcctgggcgaccgggtcactatcacgtgtcgggcatcccagggtatctcgtcatatctggcgtggtatcaacagaagcctggtaaagccccgaagttgcttatctacgccaagtcaaccctccagtcgggggtccccagcagattttcggggtcgggaagcggaacggacttcacgctcaccatctcaagcctccagccagaggattcagctacgtactattgccaacagtactggacgttccctcttacattcgggggtgggacaaaagtggagattaagagaacttgataa

SEQ ID NO: 280 - protein, 720 aa, Artificial Sequence
  Description of Artificial Sequence: Synthetic polypeptide
EVQLVESGGGLVQPGRSLRLSCAASGFTFDDYAMHWVRQAPGKGLEWVSGISWDSGSVGYADSVKGRFTISRDNAKNSLYLQMNSLRAEDTALYYCARDLGYNQWWEGFDYWGQGTLVTVSSASTKGPSVFPLAPSSKSTSGGTAALGCLVKDYFPEPVTVSWNSGALTSGVHTFPAVLQSSGLYSLSSVVTVPSSSLGTQTYICNVNHKPSNTKVDKKVEPKSCDKTHTCPPCPAPELLGGPSVFLFPPKPKDTLMISRTPEVTCVVVDVSHEDPEVKFNWYVDGVEVHNAKTKPREEQYNSTYRVVSVLTVLHQDWLNGKEYKCKVSNKALPAPIEKTISKAKGQPREPQVYTLPPSREEMTKNQVSLTCLVKGFYPSDIAVEWESNGQPENNYKTTPPVLDSDGSFFLYSKLTVDKSRWQQGNVFSCSVMHEALHNHYTQKSLSLSPGGGGGSGGGGSGGGGSEVQLLQSGGGLVQPGGSLRLSCAASGFMFSRYPMHWVRQAPGKGLEWVGSISGSGGATPYADSVKGRFTISRDNSKNTLYLQMNSLRAEDTAVYYCAKDFYQILTGNAFDYWGQGTTVTVSSASTGGGGSGGGGSGGGGSGGGGSDIQMTQSPSSLSASLGDRVTITCRASQGISSYLAWYQQKPGKAPKLLIYAKSTLQSGVPSRFSGSGSGTDFTLTISSLQPEDSATYYCQQYWTFPLTFGGGTKVEIKRT

SEQ ID NO: 281 - DNA, 2166 bp, Artificial Sequence
  Description of Artificial Sequence: Synthetic polynucleotide
gaggtccagctcgtcgagtcaggtggaggactggtgcaacccggtcgatcacttcggctgtcgtgtgcggcatcgggattcacgtttgacgattatgccatgcattgggtgcgacaagctccgggcaaagggcttgaatgggtgtccggaatctcgtgggattcggggtcagtgggctatgccgattccgtaaagggtaggttcaccatctcacgcgacaatgcgaagaattcgttgtacctccaaatgaattcgcttagggcagaagatacggccttgtactattgcgcaagggaccttgggtacaaccagtggtgggaaggtttcgattactggggtcagggaaccctggtaacggtgtcgagcgctagcactaagggaccgtccgtgtttcccctcgcgcctagctcgaagagcacatcgggaggaacagcggcgctcggctgtctcgtcaaagactacttccccgagccggtgaccgtgagctggaattccggagcgttgacctcaggggtgcatacattccctgccgtactgcaatcatcagggctctactcattgtcgagcgtagtgactgtaccgtcgtcatcgctcggaacgcagacgtacatctgcaatgtcaatcacaagccctccaatactaaggtagataagaaagtagaaccgaagtcgtgtgataagacccatacatgccctccgtgccccgcaccggaactcttgggtggcccatcagtctttctgttcccgccaaagcccaaagacacactgatgatttcgcgcacgcccgaagtcacttgcgtcgtggtggatgtgtcgcatgaggacccggaggtcaagttcaactggtacgtcgatggtgtagaagtccacaacgccaagaccaagcctcgggaggagcagtataactccacctaccgggtagtgagcgtgcttacagtgctccatcaggactggctgaacggcaaagaatacaaatgcaaagtcagcaacaaagcgctgccagcgcccatcgagaaaacaattagcaaagcgaaagggcagcccagagaacctcaagtgtatacattgccgccgtcgcgggaggaaatgacaaagaatcaggtatccctgacgtgtcttgtgaaaggcttttacccatccgacattgcggtagagtgggagtcgaatgggcaacccgagaacaactataagacgactcccccagtcttggattcagacggatcctttttcttgtactcgaaactcacagtcgacaagtccagatggcagcaggggaacgtgttcagctgcagcgtgatgcacgaggcccttcacaaccactatacgcagaaatcattaagcttatcgcccggtggaggagggggttccggtggtggtgggtcgggaggaggaggctcggaggtgcagcttctgcagtcgggtggagggctcgtgcagccaggcggctcacttcgcctttcatgcgcggcatcaggctttttcttcagcaagtatcccatgcattgggtcagacaagcaccggggaagggattggaatgggtcagctcaatttcgtcggatgggggagccacagtatacgcggactccgtaaaagggcgattcacaatttcccgcgacaattccaaaaacacgctgtatctccaaatgaactcgcttagggctgaagataccgccgtctactactgtgcgaaggacttttacacttggttgactggtaatgcgttcgattcatgggggcagggcacaagcgtgacagtatcgtccgcctcaacgggaggtggaggtagcggaggcggagggtcgggcggtggtggaagcgggggaggagggagcgacatccagctgacgcagtcaccctcatcgctgtccgcgtcattgggagatcgggtgacgattacttgcagagcatcgcagggaatctcctcgtacctcgcctggtatcaacaaaaacccgggaaagcaccgaaacttctcatctacgcgagatcgacgcgccagagcggagtacctagcaggttctccgggtcgggaagcgggacagagtttaccctcacaatctcgtcattgcagccggaggactcggctacgtactattgtcagcagtattggacctggcctttgacttttggcggagggacgaaggtggagatcaagcggacatgataa

SEQ ID NO: 282 - protein, 720 aa, Artificial Sequence
  Description of Artificial Sequence: Synthetic polypeptide
EVQLVESGGGLVQPGRSLRLSCAASGFTFDDYAMHWVRQAPGKGLEWVSGISWDSGSVGYADSVKGRFTISRDNAKNSLYLQMNSLRAEDTALYYCARDLGYNQWWEGFDYWGQGTLVTVSSASTKGPSVFPLAPSSKSTSGGTAALGCLVKDYFPEPVTVSWNSGALTSGVHTFPAVLQSSGLYSLSSVVTVPSSSLGTQTYICNVNHKPSNTKVDKKVEPKSCDKTHTCPPCPAPELLGGPSVFLFPPKPKDTLMISRTPEVTCVVVDVSHEDPEVKFNWYVDGVEVHNAKTKPREEQYNSTYRVVSVLTVLHQDWLNGKEYKCKVSNKALPAPIEKTISKAKGQPREPQVYTLPPSREEMTKNQVSLTCLVKGFYPSDIAVEWESNGQPENNYKTTPPVLDSDGSFFLYSKLTVDKSRWQQGNVFSCSVMHEALHNHYTQKSLSLSPGGGGGSGGGGSGGGGSEVQLLQSGGGLVQPGGSLRLSCAASGFFFSKYPMHWVRQAPGKGLEWVSSISSDGGATVYADSVKGRFTISRDNSKNTLYLQMNSLRAEDTAVYYCAKDFYTWLTGNAFDSWGQGTSVTVSSASTGGGGSGGGGSGGGGSGGGGSDIQLTQSPSSLSASLGDRVTITCRASQGISSYLAWYQQKPGKAPKLLIYARSTRQSGVPSRFSGSGSGTEFTLTISSLQPEDSATYYCQQYWTWPLTFGGGTKVEIKRT

SEQ ID NO: 283 - DNA, 2166 bp, Artificial Sequence
  Description of Artificial Sequence: Synthetic polynucleotide
gaggtccagctcgtcgagtcaggtggaggactggtgcaacccggtcgatcacttcggctgtcgtgtgcggcatcgggattcacgtttgacgattatgccatgcattgggtgcgacaagctccgggcaaagggcttgaatgggtgtccggaatctcgtgggattcggggtcagtgggctatgccgattccgtaaagggtaggttcaccatctcacgcgacaatgcgaagaattcgttgtacctccaaatgaattcgcttagggcagaagatacggccttgtactattgcgcaagggaccttgggtacaaccagtggtgggaaggtttcgattactggggtcagggaaccctggtaacggtgtcgagcgctagcactaagggaccgtccgtgtttcccctcgcgcctagctcgaagagcacatcgggaggaacagcggcgctcggctgtctcgtcaaagactacttccccgagccggtgaccgtgagctggaattccggagcgttgacctcaggggtgcatacattccctgccgtactgcaatcatcagggctctactcattgtcgagcgtagtgactgtaccgtcgtcatcgctcggaacgcagacgtacatctgcaatgtcaatcacaagccctccaatactaaggtagataagaaagtagaaccgaagtcgtgtgataagacccatacatgccctccgtgccccgcaccggaactcttgggtggcccatcagtctttctgttcccgccaaagcccaaagacacactgatgatttcgcgcacgcccgaagtcacttgcgtcgtggtggatgtgtcgcatgaggacccggaggtcaagttcaactggtacgtcgatggtgtagaagtccacaacgccaagaccaagcctcgggaggagcagtataactccacctaccgggtagtgagcgtgcttacagtgctccatcaggactggctgaacggcaaagaatacaaatgcaaagtcagcaacaaagcgctgccagcgcccatcgagaaaacaattagcaaagcgaaagggcagcccagagaacctcaagtgtatacattgccgccgtcgcgggaggaaatgacaaagaatcaggtatccctgacgtgtcttgtgaaaggcttttacccatccgacattgcggtagagtgggagtcgaatgggcaacccgagaacaactataagacgactcccccagtcttggattcagacggatcctttttcttgtactcgaaactcacagtcgacaagtccagatggcagcaggggaacgtgttcagctgcagcgtgatgcacgaggcccttcacaaccactatacgcagaaatcattaagcttatcgcccggaggaggtgggggttccgggggtgggggatccggtggaggagggtccgaggtccaactgctgcagtccggcggagggctcgtgcagcctggcggtagcctgagactttcgtgtgcggccagcgggtttgacttttcatcatatcccatgcactgggtgagacaagctccggggaaaggtcttgaatgggtcggctccatttcgtcatcgggtggtgcgaccccgtacgccgattcggtgaagggacgattcaccatctcgcgggataactcgaagaacactctttatctccagatgaattcgctgaggcccgaagatacggcagtgtattactgtgcgaaagacttctatacgattttgactggcaatgcattcgacatgtggggccagggaacgtcggtaacagtctcaagcgcatcaacaggtggtggagggtcgggaggaggaggaagcggtgggggagggtcagggggaggcggatcggacatccagatgacccagtccccttcctcgctctccgcgtccttgggtgaccgcgtaacgatcacatgcagagcaagccaaggaatttcaagctatcttgcgtggtatcagcagaagccgggtaaagcgcccaagttgttgatctacgccagctccacaaggcagtcgggggtcccctcacgcttttcggggtcgggctcgggaactgacttcaccttgacgatctccagcctccagccagaggattcagggacctactactgccaacagtactgggcgtttcccctgacattcggagggggaacaaaagtagagatcaagcggacgtgataa

SEQ ID NO: 284 - protein, 720 aa, Artificial Sequence
  Description of Artificial Sequence: Synthetic polypeptide
EVQLVESGGGLVQPGRSLRLSCAASGFTFDDYAMHWVRQAPGKGLEWVSGISWDSGSVGYADSVKGRFTISRDNAKNSLYLQMNSLRAEDTALYYCARDLGYNQWWEGFDYWGQGTLVTVSSASTKGPSVFPLAPSSKSTSGGTAALGCLVKDYFPEPVTVSWNSGALTSGVHTFPAVLQSSGLYSLSSVVTVPSSSLGTQTYICNVNHKPSNTKVDKKVEPKSCDKTHTCPPCPAPELLGGPSVFLFPPKPKDTLMISRTPEVTCVVVDVSHEDPEVKFNWYVDGVEVHNAKTKPREEQYNSTYRVVSVLTVLHQDWLNGKEYKCKVSNKALPAPIEKTISKAKGQPREPQVYTLPPSREEMTKNQVSLTCLVKGFYPSDIAVEWESNGQPENNYKTTPPVLDSDGSFFLYSKLTVDKSRWQQGNVFSCSVMHEALHNHYTQKSLSLSPGGGGGSGGGGSGGGGSEVQLLQSGGGLVQPGGSLRLSCAASGFDFSSYPMHWVRQAPGKGLEWVGSISSSGGATPYADSVKGRFTISRDNSKNTLYLQMNSLRPEDTAVYYCAKDFYTILTGNAFDMWGQGTSVTVSSASTGGGGSGGGGSGGGGSGGGGSDIQMTQSPSSLSASLGDRVTITCRASQGISSYLAWYQQKPGKAPKLLIYASSTRQSGVPSRFSGSGSGTDFTLTISSLQPEDSGTYYCQQYWAFPLTFGGGTKVEIKRT

SEQ ID NO: 285 - DNA, 2166 bp, Artificial Sequence
  Description of Artificial Sequence: Synthetic polynucleotide
gaggtccagctcgtcgagtcaggtggaggactggtgcaacccggtcgatcacttcggctgtcgtgtgcggcatcgggattcacgtttgacgattatgccatgcattgggtgcgacaagctccgggcaaagggcttgaatgggtgtccggaatctcgtggaattcggggtcaagaggctatgccgattccgtaaagggtaggttcaccatctcacgcgacaatgcgaagaattcgttgtacttgcagatgaattcgcttagggcagaagatacggccttgtactattgcgcaagggaccttgggttcaatcagtgggaagagggtttcgattactggggtcagggaaccctggtaacggtgtcgagcgctagcactaagggaccgtccgtgtttcccctcgcgcctagctcgaagagcacatcgggaggaacagcggcgctcggctgtctcgtcaaagactacttccccgagccggtgaccgtgagctggaattccggagcgttgacctcaggggtgcatacattccctgccgtactgcaatcatcagggctctactcattgtcgagcgtagtgactgtaccgtcgtcatcgctcggaacgcagacgtacatctgcaatgtcaatcacaagccctccaatactaaggtagataagaaagtagaaccgaagtcgtgtgataagacccatacatgccctccgtgccccgcaccggaactcttgggtggcccatcagtctttctgttcccgccaaagcccaaagacacactgatgatttcgcgcacgcccgaagtcacttgcgtcgtggtggatgtgtcgcatgaggacccggaggtcaagttcaactggtacgtcgatggtgtagaagtccacaacgccaagaccaagcctcgggaggagcagtataactccacctaccgggtagtgagcgtgcttacagtgctccatcaggactggctgaacggcaaagaatacaaatgcaaagtcagcaacaaagcgctgccagcgcccatcgagaaaacaattagcaaagcgaaagggcagcccagagaacctcaagtgtatacattgccgccgtcgcgggaggaaatgacaaagaatcaggtatccctgacgtgtcttgtgaaaggcttttacccatccgacattgcggtagagtgggagtcgaatgggcaacccgagaacaactataagacgactcccccagtcttggattcagacggatcctttttcttgtactcgaaactcacagtcgacaagtccagatggcagcaggggaacgtgttcagctgcagcgtgatgcacgaggcccttcacaaccactatacgcagaaatcattaagcttatcgccgggtggtgggggaggtagcgggggtggagggtccggaggtgggggaagcgaagtgcaacttctccagtccggagggggcctcgtacaacccggagggtcattgaggctgtcatgtgcagcgtcggggttcatgttttcacggtatcccatgcactgggtgcgacaggcgccagggaaaggcctcgaatgggtaggatccatttcgggatcgggcggtgcaactccctacgccgacagcgtgaagggaaggtttaccatctcacgcgataactcgaaaaacacgctgtacttgcagatgaattcgctgagggcggaagatacggcggtctactattgcgctaaggacttctaccagattttgacaggaaatgcctttgattactggggtcagggcacgacagtaacagtgtcatcggcgtcgacagggggagggggctcgggaggaggcgggtcaggtggagggggatcgggtggcggaggatccgatattcagatgacccagtccccgtccagccttagcgcgagcctgggcgaccgggtcactatcacgtgtcgggcatcccagggtatctcgtcatatctggcgtggtatcaacagaagcctggtaaagccccgaagttgcttatctacgccaagtcaaccctccagtcgggggtccccagcagattttcggggtcgggaagcggaacggacttcacgctcaccatctcaagcctccagccagaggattcagctacgtactattgccaacagtactggacgttccctcttacattcgggggtgggacaaaagtggagattaagagaacttgataa

SEQ ID NO: 286 - protein, 720 aa, Artificial Sequence
  Description of Artificial Sequence: Synthetic polypeptide
EVQLVESGGGLVQPGRSLRLSCAASGFTFDDYAMHWVRQAPGKGLEWVSGISWNSGSRGYADSVKGRFTISRDNAKNSLYLQMNSLRAEDTALYYCARDLGFNQWEEGFDYWGQGTLVTVSSASTKGPSVFPLAPSSKSTSGGTAALGCLVKDYFPEPVTVSWNSGALTSGVHTFPAVLQSSGLYSLSSVVTVPSSSLGTQTYICNVNHKPSNTKVDKKVEPKSCDKTHTCPPCPAPELLGGPSVFLFPPKPKDTLMISRTPEVTCVVVDVSHEDPEVKFNWYVDGVEVHNAKTKPREEQYNSTYRVVSVLTVLHQDWLNGKEYKCKVSNKALPAPIEKTISKAKGQPREPQVYTLPPSREEMTKNQVSLTCLVKGFYPSDIAVEWESNGQPENNYKTTPPVLDSDGSFFLYSKLTVDKSRWQQGNVFSCSVMHEALHNHYTQKSLSLSPGGGGGSGGGGSGGGGSEVQLLQSGGGLVQPGGSLRLSCAASGFMFSRYPMHWVRQAPGKGLEWVGSISGSGGATPYADSVKGRFTISRDNSKNTLYLQMNSLRAEDTAVYYCAKDFYQILTGNAFDYWGQGTTVTVSSASTGGGGSGGGGSGGGGSGGGGSDIQMTQSPSSLSASLGDRVTITCRASQGISSYLAWYQQKPGKAPKLLIYAKSTLQSGVPSRFSGSGSGTDFTLTISSLQPEDSATYYCQQYWTFPLTFGGGTKVEIKRT

SEQ ID NO: 287 - DNA, 2166 bp, Artificial Sequence
  Description of Artificial Sequence: Synthetic polynucleotide
gaggtccagctcgtcgagtcaggtggaggactggtgcaacccggtcgatcacttcggctgtcgtgtgcggcatcgggattcacgtttgacgattatgccatgcattgggtgcgacaagctccgggcaaagggcttgaatgggtgtccggaatctcgtggaattcggggtcaagaggctatgccgattccgtaaagggtaggttcaccatctcacgcgacaatgcgaagaattcgttgtacttgcagatgaattcgcttagggcagaagatacggccttgtactattgcgcaagggaccttgggttcaatcagtgggaagagggtttcgattactggggtcagggaaccctggtaacggtgtcgagcgctagcactaagggaccgtccgtgtttcccctcgcgcctagctcgaagagcacatcgggaggaacagcggcgctcggctgtctcgtcaaagactacttccccgagccggtgaccgtgagctggaattccggagcgttgacctcaggggtgcatacattccctgccgtactgcaatcatcagggctctactcattgtcgagcgtagtgactgtaccgtcgtcatcgctcggaacgcagacgtacatctgcaatgtcaatcacaagccctccaatactaaggtagataagaaagtagaaccgaagtcgtgtgataagacccatacatgccctccgtgccccgcaccggaactcttgggtggcccatcagtctttctgttcccgccaaagcccaaagacacactgatgatttcgcgcacgcccgaagtcacttgcgtcgtggtggatgtgtcgcatgaggacccggaggtcaagttcaactggtacgtcgatggtgtagaagtccacaacgccaagaccaagcctcgggaggagcagtataactccacctaccgggtagtgagcgtgcttacagtgctccatcaggactggctgaacggcaaagaatacaaatgcaaagtcagcaacaaagcgctgccagcgcccatcgagaaaacaattagcaaagcgaaagggcagcccagagaacctcaagtgtatacattgccgccgtcgcgggaggaaatgacaaagaatcaggtatccctgacgtgtcttgtgaaaggcttttacccatccgacattgcggtagagtgggagtcgaatgggcaacccgagaacaactataagacgactcccccagtcttggattcagacggatcctttttcttgtactcgaaactcacagtcgacaagtccagatggcagcaggggaacgtgttcagctgcagcgtgatgcacgaggcccttcacaaccactatacgcagaaatcattaagcttatcgcccggtggaggagggggttccggtggtggtgggtcgggaggaggaggctcggaggtgcagcttctgcagtcgggtggagggctcgtgcagccaggcggctcacttcgcctttcatgcgcggcatcaggctttttcttcagcaagtatcccatgcattgggtcagacaagcaccggggaagggattggaatgggtcagctcaatttcgtcggatgggggagccacagtatacgcggactccgtaaaagggcgattcacaatttcccgcgacaattccaaaaacacgctgtatctccaaatgaactcgcttagggctgaagataccgccgtctactactgtgcgaaggacttttacacttggttgactggtaatgcgttcgattcatgggggcagggcacaagcgtgacagtatcgtccgcctcaacgggaggtggaggtagcggaggcggagggtcgggcggtggtggaagcgggggaggagggagcgacatccagctgacgcagtcaccctcatcgctgtccgcgtcattgggagatcgggtgacgattacttgcagagcatcgcagggaatctcctcgtacctcgcctggtatcaacaaaaacccgggaaagcaccgaaacttctcatctacgcgagatcgacgcgccagagcggagtacctagcaggttctccgggtcgggaagcgggacagagtttaccctcacaatctcgtcattgcagccggaggactcggctacgtactattgtcagcagtattggacctggcctttgacttttggcggagggacgaaggtggagatcaagcggacatgataa

SEQ ID NO: 288 - protein, 720 aa, Artificial Sequence
  Description of Artificial Sequence: Synthetic polypeptide
EVQLVESGGGLVQPGRSLRLSCAASGFTFDDYAMHWVRQAPGKGLEWVSGISWNSGSRGYADSVKGRFTISRDNAKNSLYLQMNSLRAEDTALYYCARDLGFNQWEEGFDYWGQGTLVTVSSASTKGPSVFPLAPSSKSTSGGTAALGCLVKDYFPEPVTVSWNSGALTSGVHTFPAVLQSSGLYSLSSVVTVPSSSLGTQTYICNVNHKPSNTKVDKKVEPKSCDKTHTCPPCPAPELLGGPSVFLFPPKPKDTLMISRTPEVTCVVVDVSHEDPEVKFNWYVDGVEVHNAKTKPREEQYNSTYRVVSVLTVLHQDWLNGKEYKCKVSNKALPAPIEKTISKAKGQPREPQVYTLPPSREEMTKNQVSLTCLVKGFYPSDIAVEWESNGQPENNYKTTPPVLDSDGSFFLYSKLTVDKSRWQQGNVFSCSVMHEALHNHYTQKSLSLSPGGGGGSGGGGSGGGGSEVQLLQSGGGLVQPGGSLRLSCAASGFFFSKYPMHWVRQAPGKGLEWVSSISSDGGATVYADSVKGRFTISRDNSKNTLYLQMNSLRAEDTAVYYCAKDFYTWLTGNAFDSWGQGTSVTVSSASTGGGGSGGGGSGGGGSGGGGSDIQLTQSPSSLSASLGDRVTITCRASQGISSYLAWYQQKPGKAPKLLIYARSTRQSGVPSRFSGSGSGTEFTLTISSLQPEDSATYYCQQYWTWPLTFGGGTKVEIKRT

SEQ ID NO: 289 - DNA, 2166 bp, Artificial Sequence
  Description of Artificial Sequence: Synthetic polynucleotide
gaggtccagctcgtcgagtcaggtggaggactggtgcaacccggtcgatcacttcggctgtcgtgtgcggcatcgggattcacgtttgacgattatgccatgcattgggtgcgacaagctccgggcaaagggcttgaatgggtgtccggaatctcgtggaattcggggtcaagaggctatgccgattccgtaaagggtaggttcaccatctcacgcgacaatgcgaagaattcgttgtacttgcagatgaattcgcttagggcagaagatacggccttgtactattgcgcaagggaccttgggttcaatcagtgggaagagggtttcgattactggggtcagggaaccctggtaacggtgtcgagcgctagcactaagggaccgtccgtgtttcccctcgcgcctagctcgaagagcacatcgggaggaacagcggcgctcggctgtctcgtcaaagactacttccccgagccggtgaccgtgagctggaattccggagcgttgacctcaggggtgcatacattccctgccgtactgcaatcatcagggctctactcattgtcgagcgtagtgactgtaccgtcgtcatcgctcggaacgcagacgtacatctgcaatgtcaatcacaagccctccaatactaaggtagataagaaagtagaaccgaagtcgtgtgataagacccatacatgccctccgtgccccgcaccggaactcttgggtggcccatcagtctttctgttcccgccaaagcccaaagacacactgatgatttcgcgcacgcccgaagtcacttgcgtcgtggtggatgtgtcgcatgaggacccggaggtcaagttcaactggtacgtcgatggtgtagaagtccacaacgccaagaccaagcctcgggaggagcagtataactccacctaccgggtagtgagcgtgcttacagtgctccatcaggactggctgaacggcaaagaatacaaatgcaaagtcagcaacaaagcgctgccagcgcccatcgagaaaacaattagcaaagcgaaagggcagcccagagaacctcaagtgtatacattgccgccgtcgcgggaggaaatgacaaagaatcaggtatccctgacgtgtcttgtgaaaggcttttacccatccgacattgcggtagagtgggagtcgaatgggcaacccgagaacaactataagacgactcccccagtcttggattcagacggatcctttttcttgtactcgaaactcacagtcgacaagtccagatggcagcaggggaacgtgttcagctgcagcgtgatgcacgaggcccttcacaaccactatacgcagaaatcattaagcttatcgcccggaggaggtgggggttccgggggtgggggatccggtggaggagggtccgaggtccaactgctgcagtccggcggagggctcgtgcagcctggcggtagcctgagactttcgtgtgcggccagcgggtttgacttttcatcatatcccatgcactgggtgagacaagctccggggaaaggtcttgaatgggtcggctccatttcgtcatcgggtggtgcgaccccgtacgccgattcggtgaagggacgattcaccatctcgcgggataactcgaagaacactctttatctccagatgaattcgctgaggcccgaagatacggcagtgtattactgtgcgaaagacttctatacgattttgactggcaatgcattcgacatgtggggccagggaacgtcggtaacagtctcaagcgcatcaacaggtggtggagggtcgggaggaggaggaagcggtgggggagggtcagggggaggcggatcggacatccagatgacccagtccccttcctcgctctccgcgtccttgggtgaccgcgtaacgatcacatgcagagcaagccaaggaatttcaagctatcttgcgtggtatcagcagaagccgggtaaagcgcccaagttgttgatctacgccagctccacaaggcagtcgggggtcccctcacgcttttcggggtcgggctcgggaactgacttcaccttgacgatctccagcctccagccagaggattcagggacctactactgccaacagtactgggcgtttcccctgacattcggagggggaacaaaagtagagatcaagcggacgtgataa

SEQ ID NO: 290 - protein, 720 aa, Artificial Sequence
  Description of Artificial Sequence: Synthetic polypeptide
EVQLVESGGGLVQPGRSLRLSCAASGFTFDDYAMHWVRQAPGKGLEWVSGISWNSGSRGYADSVKGRFTISRDNAKNSLYLQMNSLRAEDTALYYCARDLGFNQWEEGFDYWGQGTLVTVSSASTKGPSVFPLAPSSKSTSGGTAALGCLVKDYFPEPVTVSWNSGALTSGVHTFPAVLQSSGLYSLSSVVTVPSSSLGTQTYICNVNHKPSNTKVDKKVEPKSCDKTHTCPPCPAPELLGGPSVFLFPPKPKDTLMISRTPEVTCVVVDVSHEDPEVKFNWYVDGVEVHNAKTKPREEQYNSTYRVVSVLTVLHQDWLNGKEYKCKVSNKALPAPIEKTISKAKGQPREPQVYTLPPSREEMTKNQVSLTCLVKGFYPSDIAVEWESNGQPENNYKTTPPVLDSDGSFFLYSKLTVDKSRWQQGNVFSCSVMHEALHNHYTQKSLSLSPGGGGGSGGGGSGGGGSEVQLLQSGGGLVQPGGSLRLSCAASGFDFSSYPMHWVRQAPGKGLEWVGSISSSGGATPYADSVKGRFTISRDNSKNTLYLQMNSLRPEDTAVYYCAKDFYTILTGNAFDMWGQGTSVTVSSASTGGGGSGGGGSGGGGSGGGGSDIQMTQSPSSLSASLGDRVTITCRASQGISSYLAWYQQKPGKAPKLLIYASSTRQSGVPSRFSGSGSGTDFTLTISSLQPEDSGTYYCQQYWAFPLTFGGGTKVEIKRT

SEQ ID NO: 291 - DNA, 2166 bp, Artificial Sequence
  Description of Artificial Sequence: Synthetic polynucleotide
gaggtccagctcgtcgagtcaggtggaggactggtgcaacccggtcgatcacttcggctgtcgtgtgcggcatcgggattcacgtttgacgattatgccatgcattgggtgcgacaagctccgggcaaagggcttgaatgggtgtccggaatctcgtgggattcggggtcagtgggctatgccgattccgtaaagggtaggttcaccatctcacgcgacaatgcgaagaattcgttgtatcttcagatgaattcgcttagggcagaagatacggccttgtactattgcgcaagggaccttggggcgtaccagtgggaggagggtttcgattactggggtcagggaaccctggtaacggtgtcgagcgctagcactaagggaccgtccgtgtttcccctcgcgcctagctcgaagagcacatcgggaggaacagcggcgctcggctgtctcgtcaaagactacttccccgagccggtgaccgtgagctggaattccggagcgttgacctcaggggtgcatacattccctgccgtactgcaatcatcagggctctactcattgtcgagcgtagtgactgtaccgtcgtcatcgctcggaacgcagacgtacatctgcaatgtcaatcacaagccctccaatactaaggtagataagaaagtagaaccgaagtcgtgtgataagacccatacatgccctccgtgccccgcaccggaactcttgggtggcccatcagtctttctgttcccgccaaagcccaaagacacactgatgatttcgcgcacgcccgaagtcacttgcgtcgtggtggatgtgtcgcatgaggacccggaggtcaagttcaactggtacgtcgatggtgtagaagtccacaacgccaagaccaagcctcgggaggagcagtataactccacctaccgggtagtgagcgtgcttacagtgctccatcaggactggctgaacggcaaagaatacaaatgcaaagtcagcaacaaagcgctgccagcgcccatcgagaaaacaattagcaaagcgaaagggcagcccagagaacctcaagtgtatacattgccgccgtcgcgggaggaaatgacaaagaatcaggtatccctgacgtgtcttgtgaaaggcttttacccatccgacattgcggtagagtgggagtcgaatgggcaacccgagaacaactataagacgactcccccagtcttggattcagacggatcctttttcttgtactcgaaactcacagtcgacaagtccagatggcagcaggggaacgtgttcagctgcagcgtgatgcacgaggcccttcacaaccactatacgcagaaatcattaagcttatcgccgggtggtgggggaggtagcgggggtggagggtccggaggtgggggaagcgaagtgcaacttctccagtccggagggggcctcgtacaacccggagggtcattgaggctgtcatgtgcagcgtcggggttcatgttttcacggtatcccatgcactgggtgcgacaggcgccagggaaaggcctcgaatgggtaggatccatttcgggatcgggcggtgcaactccctacgccgacagcgtgaagggaaggtttaccatctcacgcgataactcgaaaaacacgctgtacttgcagatgaattcgctgagggcggaagatacggcggtctactattgcgctaaggacttctaccagattttgacaggaaatgcctttgattactggggtcagggcacgacagtaacagtgtcatcggcgtcgacagggggagggggctcgggaggaggcgggtcaggtggagggggatcgggtggcggaggatccgatattcagatgacccagtccccgtccagccttagcgcgagcctgggcgaccgggtcactatcacgtgtcgggcatcccagggtatctcgtcatatctggcgtggtatcaacagaagcctggtaaagccccgaagttgcttatctacgccaagtcaaccctccagtcgggggtccccagcagattttcggggtcgggaagcggaacggacttcacgctcaccatctcaagcctccagccagaggattcagctacgtactattgccaacagtactggacgttccctcttacattcgggggtgggacaaaagtggagattaagagaacttgataa

SEQ ID NO: 292 - protein, 720 aa, Artificial Sequence
  Description of Artificial Sequence: Synthetic polypeptide
EVQLVESGGGLVQPGRSLRLSCAASGFTFDDYAMHWVRQAPGKGLEWVSGISWDSGSVGYADSVKGRFTISRDNAKNSLYLQMNSLRAEDTALYYCARDLGAYQWEEGFDYWGQGTLVTVSSASTKGPSVFPLAPSSKSTSGGTAALGCLVKDYFPEPVTVSWNSGALTSGVHTFPAVLQSSGLYSLSSVVTVPSSSLGTQTYICNVNHKPSNTKVDKKVEPKSCDKTHTCPPCPAPELLGGPSVFLFPPKPKDTLMISRTPEVTCVVVDVSHEDPEVKFNWYVDGVEVHNAKTKPREEQYNSTYRVVSVLTVLHQDWLNGKEYKCKVSNKALPAPIEKTISKAKGQPREPQVYTLPPSREEMTKNQVSLTCLVKGFYPSDIAVEWESNGQPENNYKTTPPVLDSDGSFFLYSKLTVDKSRWQQGNVFSCSVMHEALHNHYTQKSLSLSPGGGGGSGGGGSGGGGSEVQLLQSGGGLVQPGGSLRLSCAASGFMFSRYPMHWVRQAPGKGLEWVGSISGSGGATPYADSVKGRFTISRDNSKNTLYLQMNSLRAEDTAVYYCAKDFYQILTGNAFDYWGQGTTVTVSSASTGGGGSGGGGSGGGGSGGGGSDIQMTQSPSSLSASLGDRVTITCRASQGISSYLAWYQQKPGKAPKLLIYAKSTLQSGVPSRFSGSGSGTDFTLTISSLQPEDSATYYCQQYWTFPLTFGGGTKVEIKRT

SEQ ID NO: 293 - DNA, 2166 bp, Artificial Sequence
  Description of Artificial Sequence: Synthetic polynucleotide
gaggtccagctcgtcgagtcaggtggaggactggtgcaacccggtcgatcacttcggctgtcgtgtgcggcatcgggattcacgtttgacgattatgccatgcattgggtgcgacaagctccgggcaaagggcttgaatgggtgtccggaatctcgtgggattcggggtcagtgggctatgccgattccgtaaagggtaggttcaccatctcacgcgacaatgcgaagaattcgttgtatcttcagatgaattcgcttagggcagaagatacggccttgtactattgcgcaagggaccttggggcgtaccagtgggaggagggtttcgattactggggtcagggaaccctggtaacggtgtcgagcgctagcactaagggaccgtccgtgtttcccctcgcgcctagctcgaagagcacatcgggaggaacagcggcgctcggctgtctcgtcaaagactacttccccgagccggtgaccgtgagctggaattccggagcgttgacctcaggggtgcatacattccctgccgtactgcaatcatcagggctctactcattgtcgagcgtagtgactgtaccgtcgtcatcgctcggaacgcagacgtacatctgcaatgtcaatcacaagccctccaatactaaggtagataagaaagtagaaccgaagtcgtgtgataagacccatacatgccctccgtgccccgcaccggaactcttgggtggcccatcagtctttctgttcccgccaaagcccaaagacacactgatgatttcgcgcacgcccgaagtcacttgcgtcgtggtggatgtgtcgcatgaggacccggaggtcaagttcaactggtacgtcgatggtgtagaagtccacaacgccaagaccaagcctcgggaggagcagtataactccacctaccgggtagtgagcgtgcttacagtgctccatcaggactggctgaacggcaaagaatacaaatgcaaagtcagcaacaaagcgctgccagcgcccatcgagaaaacaattagcaaagcgaaagggcagcccagagaacctcaagtgtatacattgccgccgtcgcgggaggaaatgacaaagaatcaggtatccctgacgtgtcttgtgaaaggcttttacccatccgacattgcggtagagtgggagtcgaatgggcaacccgagaacaactataagacgactcccccagtcttggattcagacggatcctttttcttgtactcgaaactcacagtcgacaagtccagatggcagcaggggaacgtgttcagctgcagcgtgatgcacgaggcccttcacaaccactatacgcagaaatcattaagcttatcgcccggtggaggagggggttccggtggtggtgggtcgggaggaggaggctcggaggtgcagcttctgcagtcgggtggagggctcgtgcagccaggcggctcacttcgcctttcatgcgcggcatcaggctttttcttcagcaagtatcccatgcattgggtcagacaagcaccggggaagggattggaatgggtcagctcaatttcgtcggatgggggagccacagtatacgcggactccgtaaaagggcgattcacaatttcccgcgacaattccaaaaacacgctgtatctccaaatgaactcgcttagggctgaagataccgccgtctactactgtgcgaaggacttttacacttggttgactggtaatgcgttcgattcatgggggcagggcacaagcgtgacagtatcgtccgcctcaacgggaggtggaggtagcggaggcggagggtcgggcggtggtggaagcgggggaggagggagcgacatccagctgacgcagtcaccctcatcgctgtccgcgtcattgggagatcgggtgacgattacttgcagagcatcgcagggaatctcctcgtacctcgcctggtatcaacaaaaacccgggaaagcaccgaaacttctcatctacgcgagatcgacgcgccagagcggagtacctagcaggttctccgggtcgggaagcgggacagagtttaccctcacaatctcgtcattgcagccggaggactcggctacgtactattgtcagcagtattggacctggcctttgacttttggcggagggacgaaggtggagatcaagcggacatgataa

SEQ ID NO: 294 - protein, 720 aa, Artificial Sequence
  Description of Artificial Sequence: Synthetic polypeptide
EVQLVESGGGLVQPGRSLRLSCAASGFTFDDYAMHWVRQAPGKGLEWVSGISWDSGSVGYADSVKGRFTISRDNAKNSLYLQMNSLRAEDTALYYCARDLGAYQWEEGFDYWGQGTLVTVSSASTKGPSVFPLAPSSKSTSGGTAALGCLVKDYFPEPVTVSWNSGALTSGVHTFPAVLQSSGLYSLSSVVTVPSSSLGTQTYICNVNHKPSNTKVDKKVEPKSCDKTHTCPPCPAPELLGGPSVFLFPPKPKDTLMISRTPEVTCVVVDVSHEDPEVKFNWYVDGVEVHNAKTKPREEQYNSTYRVVSVLTVLHQDWLNGKEYKCKVSNKALPAPIEKTISKAKGQPREPQVYTLPPSREEMTKNQVSLTCLVKGFYPSDIAVEWESNGQPENNYKTTPPVLDSDGSFFLYSKLTVDKSRWQQGNVFSCSVMHEALHNHYTQKSLSLSPGGGGGSGGGGSGGGGSEVQLLQSGGGLVQPGGSLRLSCAASGFFFSKYPMHWVRQAPGKGLEWVSSISSDGGATVYADSVKGRFTISRDNSKNTLYLQMNSLRAEDTAVYYCAKDFYTWLTGNAFDSWGQGTSVTVSSASTGGGGSGGGGSGGGGSGGGGSDIQLTQSPSSLSASLGDRVTITCRASQGISSYLAWYQQKPGKAPKLLIYARSTRQSGVPSRFSGSGSGTEFTLTISSLQPEDSATYYCQQYWTWPLTFGGGTKVEIKRT

SEQ ID NO: 295 - DNA, 2166 bp, Artificial Sequence
  Description of Artificial Sequence: Synthetic polynucleotide
gaggtccagctcgtcgagtcaggtggaggactggtgcaacccggtcgatcacttcggctgtcgtgtgcggcatcgggattcacgtttgacgattatgccatgcattgggtgcgacaagctccgggcaaagggcttgaatgggtgtccggaatctcgtgggattcggggtcagtgggctatgccgattccgtaaagggtaggttcaccatctcacgcgacaatgcgaagaattcgttgtatcttcagatgaattcgcttagggcagaagatacggccttgtactattgcgcaagggaccttggggcgtaccagtgggaggagggtttcgattactggggtcagggaaccctggtaacggtgtcgagcgctagcactaagggaccgtccgtgtttcccctcgcgcctagctcgaagagcacatcgggaggaacagcggcgctcggctgtctcgtcaaagactacttccccgagccggtgaccgtgagctggaattccggagcgttgacctcaggggtgcatacattccctgccgtactgcaatcatcagggctctactcattgtcgagcgtagtgactgtaccgtcgtcatcgctcggaacgcagacgtacatctgcaatgtcaatcacaagccctccaatactaaggtagataagaaagtagaaccgaagtcgtgtgataagacccatacatgccctccgtgccccgcaccggaactcttgggtggcccatcagtctttctgttcccgccaaagcccaaagacacactgatgatttcgcgcacgcccgaagtcacttgcgtcgtggtggatgtgtcgcatgaggacccggaggtcaagttcaactggtacgtcgatggtgtagaagtccacaacgccaagaccaagcctcgggaggagcagtataactccacctaccgggtagtgagcgtgcttacagtgctccatcaggactggctgaacggcaaagaatacaaatgcaaagtcagcaacaaagcgctgccagcgcccatcgagaaaacaattagcaaagcgaaagggcagcccagagaacctcaagtgtatacattgccgccgtcgcgggaggaaatgacaaagaatcaggtatccctgacgtgtcttgtgaaaggcttttacccatccgacattgcggtagagtgggagtcgaatgggcaacccgagaacaactataagacgactcccccagtcttggattcagacggatcctttttcttgtactcgaaactcacagtcgacaagtccagatggcagcaggggaacgtgttcagctgcagcgtgatgcacgaggcccttcacaaccactatacgcagaaatcattaagcttatcgcccggaggaggtgggggttccgggggtgggggatccggtggaggagggtccgaggtccaactgctgcagtccggcggagggctcgtgcagcctggcggtagcctgagactttcgtgtgcggccagcgggtttgacttttcatcatatcccatgcactgggtgagacaagctccggggaaaggtcttgaatgggtcggctccatttcgtcatcgggtggtgcgaccccgtacgccgattcggtgaagggacgattcaccatctcgcgggataactcgaagaacactctttatctccagatgaattcgctgaggcccgaagatacggcagtgtattactgtgcgaaagacttctatacgattttgactggcaatgcattcgacatgtggggccagggaacgtcggtaacagtctcaagcgcatcaacaggtggtggagggtcgggaggaggaggaagcggtgggggagggtcagggggaggcggatcggacatccagatgacccagtccccttcctcgctctccgcgtccttgggtgaccgcgtaacgatcacatgcagagcaagccaaggaatttcaagctatcttgcgtggtatcagcagaagccgggtaaagcgcccaagttgttgatctacgccagctccacaaggcagtcgggggtcccctcacgcttttcggggtcgggctcgggaactgacttcaccttgacgatctccagcctccagccagaggattcagggacctactactgccaacagtactgggcgtttcccctgacattcggagggggaacaaaagtagagatcaagcggacgtgataa

SEQ ID NO: 296 - protein, 720 aa, Artificial Sequence
  Description of Artificial Sequence: Synthetic polypeptide
EVQLVESGGGLVQPGRSLRLSCAASGFTFDDYAMHWVRQAPGKGLEWVSGISWDSGSVGYADSVKGRFTISRDNAKNSLYLQMNSLRAEDTALYYCARDLGAYQWEEGFDYWGQGTLVTVSSASTKGPSVFPLAPSSKSTSGGTAALGCLVKDYFPEPVTVSWNSGALTSGVHTFPAVLQSSGLYSLSSVVTVPSSSLGTQTYICNVNHKPSNTKVDKKVEPKSCDKTHTCPPCPAPELLGGPSVFLFPPKPKDTLMISRTPEVTCVVVDVSHEDPEVKFNWYVDGVEVHNAKTKPREEQYNSTYRVVSVLTVLHQDWLNGKEYKCKVSNKALPAPIEKTISKAKGQPREPQVYTLPPSREEMTKNQVSLTCLVKGFYPSDIAVEWESNGQPENNYKTTPPVLDSDGSFFLYSKLTVDKSRWQQGNVFSCSVMHEALHNHYTQKSLSLSPGGGGGSGGGGSGGGGSEVQLLQSGGGLVQPGGSLRLSCAASGFDFSSYPMHWVRQAPGKGLEWVGSISSSGGATPYADSVKGRFTISRDNSKNTLYLQMNSLRPEDTAVYYCAKDFYTILTGNAFDMWGQGTSVTVSSASTGGGGSGGGGSGGGGSGGGGSDIQMTQSPSSLSASLGDRVTITCRASQGISSYLAWYQQKPGKAPKLLIYASSTRQSGVPSRFSGSGSGTDFTLTISSLQPEDSGTYYCQQYWAFPLTFGGGTKVEIKRT

SEQ ID NO: 297 - DNA, 702 bp, Artificial Sequence
  Description of Artificial Sequence: Synthetic polynucleotide
atgggcacgcctgcgcagttgctcttcctgttgctcctttggctgcccgacacgacgggggacattcagatgactcagagcccttcgtcccttagcgcatcaacaggggatcgagtaacgattacttgcagagcctcacaaggtatttcatcgtatctcgcatggtaccaacaaaagccgggtaaagctccgaaactcttgatctacgccgcgagcactctgcagtccggagtgccctcacgcttctcgggatcggggtcagggactgacttcacgctgaccatctccagcttgcagccagaggattttgcaacatactattgccagcagtacttcacgttccctcttacatttggaggtggaacaaaagtcgaaatcaaaaggacagtggctgcgccctcggtctttatctttccgccgtcggatgagcaactcaagtcggggactgcctcggtggtatgtttgctcaacaatttctatccccgggaagcgaaggtacagtggaaggtcgataatgccctccagagcggcaactcgcaagagtcagtcacagaacaggattccaaggactcgacgtattcactttcctcgacattgaccttgagcaaggccgactacgagaagcacaaagtgtatgcgtgtgaggtcacgcatcagggcctgtcatcgccagtgaccaagtcgtttaacagaggcgaatgc

SEQ ID NO: 298 - protein, 234 aa, Artificial Sequence
  Description of Artificial Sequence: Synthetic polypeptide
MGTPAQLLFLLLLWLPDTTGDIQMTQSPSSLSASTGDRVTITCRASQGISSYLAWYQQKPGKAPKLLIYAASTLQSGVPSRFSGSGSGTDFTLTISSLQPEDFATYYCQQYFTFPLTFGGGTKVEIKRTVAAPSVFIFPPSDEQLKSGTASVVCLLNNFYPREAKVQWKVDNALQSGNSQESVTEQDSKDSTYSLSSTLTLSKADYEKHKVYACEVTHQGLSSPVTKSFNRGEC

SEQ ID NO: 299 - DNA, 2217 bp, Artificial Sequence
  Description of Artificial Sequence: Synthetic polynucleotide
atgggcttcggtttgtcctggctgtttctggtcgctattcttaaaggagtgcagtgcgaggtgcagctcctccaaagcggagggggtttggtccagcccggtggctcgttgcgcctctcatgtgccgcgtcggggtttacattcagcgtctatccgatgcactgggtacgacaggcgccagggaaaggactggagtgggtgtcatcgatcagcagctccggaggtgctacaagatatgccgactcggtgaaaggccgctttacgatcagccgcgataacagcaagaatacgttgtacctccaaatgaactcgctgcgagccgaggacactgcggtgtactattgcgcgaaggatttctatgacatccttactggtaatgcgtttgatatctggggccaggggacaacggtcaccgtgagctcggccagcacgaaggggcctagcgtctttccgctcgccccctcgtcaaaatcaacgtcgggtggaacggccgcattgggttgtctcgtaaaggactactttccggaacccgtcaccgtatcgtggaattcaggcgccctgacttccggggtccacacctttcccgctgtcttgcagtcctcgggtttgtattcactgtcgtcagtggtgacagtaccatcatcctcactgggaactcaaacgtacatctgcaacgtgaaccacaagccgagcaacactaaggtggataagaaggtagagcccaagtcatgcgacaaaacgcatacatgcccgccatgccccgcaccagaacttttgggaggtccgtcagtgtttctctttccgcctaagcccaaagacacactgatgatttcccggacgcccgaagtcacttgtgtggtcgtcgacgtgtcccatgaagatcccgaagtaaagttcaactggtatgtcgacggtgtggaagtccacaatgcaaaaaccaagcccagggaagaacagtacaacagcacatatcgagtggtgagcgtgttgaccgtgctgcaccaagactggctcaatggaaaggagtacaaatgcaaagtgtccaacaaggcactgcctgcgcccattgagaaaacgatttcgaaagcaaagggacagccaagagaaccccaagtgtatacccttcccccgtcgcgcgaggaaatgacgaagaaccaggtatcgttgacgtgtcttgtaaagggattctatccctcggacatcgcggtcgagtgggagtccaacggacagccagagaataactacaaaaccacaccgcctgtgctggattccgacgggtcgtttttcttgtattcgaagcttacggtagacaaaagccggtggcagcagggtaatgtgttcagctgctcagtaatgcacgaggctctccataatcattacactcagaagtccctttccctttcgccgggagggggtgggggatccggcggaggtgggtcgggaggtggaggatcacaagtgcaattggtacagtcgggaggcgggcttgtgcaacccggagggtcactgcgcctttcatgtgcggcgagcggtttcacgttcgatgattatgcgatgcattgggtacggcaggcacctggcaaagggttggagtgggtagccggaatctcgtggaatagcgggagcatcggttatgcggattccgtcaaagggaggtttacaatttcgagggacaatgcgaagaacagcctgtatctccaaatgaattcgctcaggcccgaagataccgccgtctactactgcgcgagggacttgggatacaaccagtgggtggaagggtttgattactgggggcaggggactctggtaactgtctcatcggcatcgactggtggtggcgggtccggagggggaggaagcggaggaggcgggagcggaggcggtgggtccagctacgaactgactcaagatccggccgtatcggtggccctcggacaaacagtgcgaatcacctgtcagggggatagccttagatcgtactacgcttcgtggtatcagcaaaagcccggacaggcaccagtgcttgtgatctacggaaagaacaatagaccgagcggaattccggatcggttttcgggttcgacttccggaaattcggcgtcgctcacgatcaccggagctcaggcagaggatgaagcggattactattgtaattcccgcgattcgtcggggaatcattgggtgttcggtgggggtacaaaggtaactgtactcggc

SEQ ID NO: 300 - protein, 739 aa, Artificial Sequence
  Description of Artificial Sequence: Synthetic polypeptide
MGFGLSWLFLVAILKGVQCEVQLLQSGGGLVQPGGSLRLSCAASGFTFSVYPMHWVRQAPGKGLEWVSSISSSGGATRYADSVKGRFTISRDNSKNTLYLQMNSLRAEDTAVYYCAKDFYDILTGNAFDIWGQGTTVTVSSASTKGPSVFPLAPSSKSTSGGTAALGCLVKDYFPEPVTVSWNSGALTSGVHTFPAVLQSSGLYSLSSVVTVPSSSLGTQTYICNVNHKPSNTKVDKKVEPKSCDKTHTCPPCPAPELLGGPSVFLFPPKPKDTLMISRTPEVTCVVVDVSHEDPEVKFNWYVDGVEVHNAKTKPREEQYNSTYRVVSVLTVLHQDWLNGKEYKCKVSNKALPAPIEKTISKAKGQPREPQVYTLPPSREEMTKNQVSLTCLVKGFYPSDIAVEWESNGQPENNYKTTPPVLDSDGSFFLYSKLTVDKSRWQQGNVFSCSVMHEALHNHYTQKSLSLSPGGGGGSGGGGSGGGGSQVQLVQSGGGLVQPGGSLRLSCAASGFTFDDYAMHWVRQAPGKGLEWVAGISWNSGSIGYADSVKGRFTISRDNAKNSLYLQMNSLRPEDTAVYYCARDLGYNQWVEGFDYWGQGTLVTVSSASTGGGGSGGGGSGGGGSGGGGSSYELTQDPAVSVALGQTVRITCQGDSLRSYYASWYQQKPGQAPVLVIYGKNNRPSGIPDRFSGSTSGNSASLTITGAQAEDEADYYCNSRDSSGNHWVFGGGTKVTVLG

SEQ ID NO: 301 - protein, 13 aa, Artificial Sequence
  Description of Artificial Sequence: Synthetic peptide
SLSLSPGKGGGGS

SEQ ID NO: 302 - protein, 10 aa, Artificial Sequence
  Description of Artificial Sequence: Synthetic peptide
  MOD_RES (3)..(3): Phe, Asp, Asn, Thr, Leu, Val, Met, Glu, Arg, Ser, Ala, Trp or Pro
  MOD_RES (6)..(6): Lys, Ser, Arg, Val, His, Glu, Ile, Asn, Asp, Ala or Thr
GFXFSXYPMH

SEQ ID NO: 303 - protein, 16 aa, Artificial Sequence
  Description of Artificial Sequence: Synthetic peptide
  MOD_RES (3)..(3): Ser, Gly, Ala or Pro
  MOD_RES (4)..(4): Asp, Ser, Trp, Gly or Leu
  MOD_RES (9)..(9): Val, Pro, Arg, Ile or Ala
ISXXGGATXYADSVKG

SEQ ID NO: 304 - protein, 13 aa, Artificial Sequence
  Description of Artificial Sequence: Synthetic peptide
  MOD_RES (4)..(4): Thr, Gln, Asp, Tyr, Asn, Arg, Trp, Phe, His, Met or Lys
  MOD_RES (5)..(5): Trp, Ile, Met or Leu
  MOD_RES (13)..(13): Ser, Met, Tyr, Ile, Lys, Glu, Val, Ala, Arg, Thr or Asn
DFYXXLTGNAFDX

SEQ ID NO: 305 - protein, 11 aa, Artificial Sequence
  Description of Artificial Sequence: Synthetic peptide
RASQGISSYLA

SEQ ID NO: 306 - protein, 7 aa, Artificial Sequence
  Description of Artificial Sequence: Synthetic peptide
  MOD_RES (2)..(2): Arg, Ser, Lys, Ala, Gly, Gln, Thr, Asn, Pro or Asp
  MOD_RES (5)..(5): Arg, Leu, Cys, Thr, Pro, Gly, Ser, Lys, Glu, Gln, His Ala, Tyr, Ile
AXSTXQS

SEQ ID NO: 307 - protein, 9 aa, Artificial Sequence
  Description of Artificial Sequence: Synthetic peptide
  MOD_RES (4)..(4): Trp or Phe
  MOD_RES (5)..(5): Thr, Ala, Arg, Met, Phe, Ser, Asn, Trp, Gln, Leu or Val
  MOD_RES (6)..(6): Trp or Phe
QQYXXXPLT

SEQ ID NO: 308 - protein, 9 aa, Artificial Sequence
  Description of Artificial Sequence: Synthetic peptide
  MOD_RES (5)..(5): Thr, Ala, Arg, Met, Phe, Ser, Asn, Trp, Gln, Leu or Val
  MOD_RES (6)..(6): Trp or Phe
QQYWXXPLT

SEQ ID NO: 309 - protein, 10 aa, Artificial Sequence
  Description of Artificial Sequence: Synthetic peptide
GFTFDDYAMH

SEQ ID NO: 310 - protein, 16 aa, Artificial Sequence
  Description of Artificial Sequence: Synthetic peptide
  MOD_RES (4)..(4): Asp or Asn
  MOD_RES (8)..(8): Val, Arg, Thr, Ile, Met, Ser, Asn or Leu
ISWXSGSXGYADSVKG

SEQ ID NO: 311 - protein, 13 aa, Artificial Sequence
  Description of Artificial Sequence: Synthetic peptide
  MOD_RES (4)..(4): Ala, Phe or Tyr
  MOD_RES (5)..(5): Tyr, Asn, Lys, Phe, Met or Ser
  MOD_RES (8)..(8): Glu, Val, Trp, Leu, Gln or Asn
  MOD_RES (9)..(9): Glu or Asp
DLGXXQWXXGFDY

SEQ ID NO: 312 - protein, 11 aa, Artificial Sequence
  Description of Artificial Sequence: Synthetic peptide
QGDSLRSYYAS

SEQ ID NO: 313 - protein, 7 aa, Artificial Sequence
  Description of Artificial Sequence: Synthetic peptide
GKNNRPS

SEQ ID NO: 314 - protein, 11 aa, Artificial Sequence
  Description of Artificial Sequence: Synthetic peptide
  MOD_RES (1)..(1): Asn, Glu or Met
  MOD_RES (5)..(5): Trp, Val, Thr, Ser, His, Tyr, Asn or Ala
  MOD_RES (6)..(6): Ser or Pro
  MOD_RES (8)..(8): Asn or Asp
  MOD_RES (9)..(9): Gln, Lys, His, Ser, Val, Arg, Thr or Asn
XSRDXXGXXWV

SEQ ID NO: 315 - protein, 11 aa, Artificial Sequence
  Description of Artificial Sequence: Synthetic peptide
  MOD_RES (1)..(1): Asn, Glu or Met
  MOD_RES (5)..(5): Trp, Val, Thr, Ser, His, Tyr, Asn or Ala
  MOD_RES (8)..(8): Asn or Asp
  MOD_RES (9)..(9): Gln, Lys, His, Ser, Val, Arg, Thr or Asn
XSRDXPGXXWV

SEQ ID NO: 316 - protein, 708 aa, Artificial Sequence
  Description of Artificial Sequence: Synthetic polypeptide
EVQLLESGGGLVQPGGSLRLSCAASGFTFSAYNMRWVRQAPGKGLEWVSVIYPSGGATRYADSVKGRFTISRDNSKNTLYLQMNSLRAEDTAVYYCARGYYYYGMDVWGQGTLVTVSSASTKGPSVFPLAPCSRSTSESTAALGCLVKDYFPEPVTVSWNSGALTSGVHTFPAVLQSSGLYSLSSVVTVPSSNFGTQTYTCNVDHKPSNTKVDKTVERKCCVECPPCPAPPVAGPSVFLFPPKPKDTLMISRTPEVTCVVVDVSHEDPEVQFNWYVDGVEVHNAKTKPREEQFNSTFRVVSVLTVVHQDWLNGKEYKCKVSNKGLPAPIEKTISKTKGQPREPQVYTLPPSREEMTKNQVSLTCLVKGFYPSDIAVEWESNGQPENNYKTTPPMLDSDGSFFLYSKLTVDKSRWQQGNVFSCSVMHEALHNHYTQKSLSLSPGKGGGGSGGGGSGGGGSLQEVQLLESGGGLVQPGGSLRLSCAASGFTFSVYPMHWVRQAPGKGLEWVSSISSSGGATRYADSVKGRFTISRDNSKNTLYLQMNSLRAEDTAVYYCAKDFYDILTGNAFDIWGQGTMVTVSSASTGGGGSGGGGSGGGGSDIQMTQSPSSFSASTGDRVTITCRASQGISSYLAWYQQKPGKAPKLLIYAASTLQSGVPSRFSGSGSGTDFTLTISSLQPEDSATYYCQQYFTFPLTFGGGTKVEIK

SEQ ID NO: 317 - protein, 216 aa, Artificial Sequence
  Description of Artificial Sequence: Synthetic polypeptide
QSVLTQPPSASGTPGQRVTISCSGSDSNIGRNYIYWYQQFPGTAPKLLIYRNNQRPSGVPDRISGSKSGTSASLAISGLRSEDEAEYHCGTWDDSLSGPVFGGGTKLTVLGQPKAAPSVTLFPPSSEELQANKATLVCLISDFYPGAVTVAWKADSSPVKAGVETTTPSKQSNNKYAASSYLSLTPEQWKSHRSYSCQVTHEGSTVEKTVAPTECS

SEQ ID NO: 318 - protein, 712 aa, Artificial Sequence [sequence omitted]

SEQ ID NO: 319 - protein, 711 aa, Artificial Sequence
  Description of Artificial Sequence: Synthetic polypeptide
EVQLLESGGGLVQPGGSLRLSCAASGFTFSVYPMHWVRQAPGKGLEWVSSISSSGGATRYADSVKGRFTISRDNSKNTLYLQMNSLRAEDTAVYYCAKDFYDILTGNAFDIWGQGTMVTVSSASTKGPSVFPLAPCSRSTSESTAALGCLVKDYFPEPVTVSWNSGALTSGVHTFPAVLQSSGLYSLSSVVTVPSSNFGTQTYTCNVDHKPSNTKVDKTVERKCCVECPPCPAPPVAGPSVFLFPPKPKDTLMISRTPEVTCVVVDVSHEDPEVQFNWYVDGVEVHNAKTKPREEQFNSTFRVVSVLTVVHQDWLNGKEYKCKVSNKGLPAPIEKTISKTKGQPREPQVYTLPPSREEMTKNQVSLTCLVKGFYPSDIAVEWESNGQPENNYKTTPPMLDSDGSFFLYSKLTVDKSRWQQGNVFSCSVMHEALHNHYTQKSLSLSPGKGGGGSGGGGSGGGGSLQEVQLLESGGGLVQPGGSLRLSCAASGFTFSVYDMYWVRQAPGKGLEWVSYIYSSGGDTDYADSVKGRFTISRDNSKNTLYLQMNSLRAEDTATYYCARASTNSIYDAMDVWGQGTTVTVSSASTGGGGSGGGGSGGGGSDIQMTQSPSSVSASVGDRVTITCRASQDITNWLAWYQQKPGKAPTLLIYDASTLQSGVPSRFSGSGSGTDFTLTISSLQPEDFATYFCQQANGFPLTFGGGTKVEIK

SEQ ID NO: 320 - protein, 214 aa, Artificial Sequence
  Description of Artificial Sequence: Synthetic polypeptide
DIQMTQSPSSFSASTGDRVTITCRASQGISSYLAWYQQKPGKAPKLLIYAASTLQSGVPSRFSGSGSGTDFTLTISSLQPEDSATYYCQQYFTFPLTFGGGTKVEIKRTVAAPSVFIFPPSDEQLKSGTASVVCLLNNFYPREAKVQWKVDNALQSGNSQESVTEQDSKDSTYSLSSTLTLSKADYEKHKVYACEVTHQGLSSPVTKSFNRGEC

SEQ ID NO: 321 - protein, 223 aa, Artificial Sequence
  Description of Artificial Sequence: Synthetic polypeptide
EVQLLESGGGLVQPGGSLRLSCTASGFTFSSYAMNWVRQAPGKGLEWVSAISGSGGTTFYADSVKGRFTISRDNSRTTLYLQMNSLRAEDTAVYYCAKDLGWSDSYYYYYGMDVWGQGTTVTVSSASTKGPSVFPLAPSSKSTSGGTAALGCLVKDYFPEPVTVSWNSGALTSGVHTFPAVLQSSGLYSLSSVVTVPSSSLGTQTYICNVNHKPSNTKVDKKV

SEQ ID NO: 322 - protein, 214 aa, Artificial Sequence
  Description of Artificial Sequence: Synthetic polypeptide
DIQMTQFPSSLSASVGDRVTITCRASQGIRNDLGWYQQKPGKAPKRLIYAASRLHRGVPSRFSGSGSGTEFTLTISSLQPEDFATYYCLQHNSYPCSFGQGTKLEIKRTVAAPSVFIFPPSDEQLKSGTASVVCLLNNFYPREAKVQWKVDNALQSGNSQESVTEQDSKDSTYSLSSTLTLSKADYEKHKVYACEVTHQGLSSPVTKSFNRGEC

SEQ ID NO: 323 - protein, 257 aa, Artificial Sequence
  Description of Artificial Sequence: Synthetic polypeptide
EVQLLESGGGLVQPGGSLRLSCTASGFTFSSYAMNWVRQAPGKGLEWVSAISGSGGTTFYADSVKGRFTISRDNSRTTLYLQMNSLRAEDTAVYYCAKDLGWSDSYYYYYGMDVWGQGTTVTVSSASTGGGGSGGGGSGGGGSGGGGSDIQMTQFPSSLSASVGDRVTITCRASQGIRNDLGWYQQKPGKAPKRLIYAASRLHRGVPSRFSGSGSGTEFTLTISSLQPEDFATYYCLQHNSYPCSFGQGTKLEIKRT

SEQ ID NO: 324 - protein, 228 aa, Artificial Sequence
  Description of Artificial Sequence: Synthetic polypeptide
EVQLVQSGAEVKKPGSSVKVSCKASGGTFSSYAISWVRQAPGQGLEWMGGIIPIFGTANYAQKFQGRVTITADKSTSTAYMELSSLRSEDTAVYYCARAPLRFLEWSTQDHYYYYYMDVWGKGTTVTVSSASTKGPSVFPLAPSSKSTSGGTAALGCLVKDYFPEPVTVSWNSGALTSGVHTFPAVLQSSGLYSLSSVVTVPSSSLGTQTYICNVNHKPSNTKVDKKV

SEQ ID NO: 325 - protein, 214 aa, Artificial Sequence
  Description of Artificial Sequence: Synthetic polypeptide
SSELTQDPAVSVALGQTVRITCQGDSLRSYYATWYQQKPGQAPILVIYGENKRPSGIPDRFSGSSSGNTASLTITGAQAEDEADYYCKSRDGSGQHLVFGGGTKLTVLGQPKAAPSVTLFPPSSEELQANKATLVCLISDFYPGAVTVAWKADSSPVKAGVETTTPSKQSNNKYAASSYLSLTPEQWKSHRSYSCQVTHEGSTVEKTVAPAECS

SEQ ID NO: 326 - protein, 262 aa, Artificial Sequence
  Description of Artificial Sequence: Synthetic polypeptide
EVQLVQSGAEVKKPGSSVKVSCKASGGTFSSYAISWVRQAPGQGLEWMGGIIPIFGTANYAQKFQGRVTITADKSTSTAYMELSSLRSEDTAVYYCARAPLRFLEWSTQDHYYYYYMDVWGKGTTVTVSSASTGGGGSGGGGSGGGGSGGGGSSSELTQDPAVSVALGQTVRITCQGDSLRSYYATWYQQKPGQAPILVIYGENKRPSGIPDRFSGSSSGNTASLTITGAQAEDEADYYCKSRDGSGQHLVFGGGTKLTVLG

SEQ ID NO: 327 - protein, 217 aa, Artificial Sequence
  Description of Artificial Sequence: Synthetic polypeptide
QVQLQESGPGLVKPSGTLSLTCAVSGGSISSSNWWSWVRQPPGKGLEWIGEIYHSGSTNYNPSLKSRVTISVDKSKNQFSLKLSSVTAADTAVYYCARWTGRTDAFDIWGQGTMVTVSSASTKGPSVFPLAPSSKSTSGGTAALGCLVKDYFPEPVTVSWNSGALTSGVHTFPAVLQSSGLYSLSSVVTVPSSSLGTQTYICNVNHKPSNTKVDKKV

SEQ ID NO: 328 - protein, 219 aa, Artificial Sequence
  Description of Artificial Sequence: Synthetic polypeptide
DVVMTQSPLSLPVTPGEPASISCRSSQSLLHSNGYNYLDWYLQKPGQSPQLLIYLGSNRASGVPDRFSGSGSGTDFTLKISRVEAEDVGVYYCMQGTHWPLTFGQGTKVEIKRTVAAPSVFIFPPSDEQLKSGTASVVCLLNNFYPREAKVQWKVDNALQSGNSQESVTEQDSKDSTYSLSSTLTLSKADYEKHKVYACEVTHQGLSSPVTKSFNRGEC

SEQ ID NO: 329 - protein, 256 aa, Artificial Sequence
  Description of Artificial Sequence: Synthetic polypeptide
QVQLQESGPGLVKPSGTLSLTCAVSGGSISSSNWWSWVRQPPGKGLEWIGEIYHSGSTNYNPSLKSRVTISVDKSKNQFSLKLSSVTAADTAVYYCARWTGRTDAFDIWGQGTMVTVSSASTGGGGSGGGGSGGGGSGGGGSDVVMTQSPLSLPVTPGEPASISCRSSQSLLHSNGYNYLDWYLQKPGQSPQLLIYLGSNRASGVPDRFSGSGSGTDFTLKISRVEAEDVGVYYCMQGTHWPLTFGQGTKVEIKRT

SEQ ID NO: 330 - protein, 222 aa, Artificial Sequence
  Description of Artificial Sequence: Synthetic polypeptide
EVQLLESGGGLVQPGGSLRLSCAASGFTFSNYPMYWVRQAPGKGLEWVSRISSSGGRTVYADSVKGRFTISRDNSKNTLYLQMNSLRAEDTAVYYCARDRWSRSAAEYGLGGYWGQGTLVTVSSASTKGPSVFPLAPSSKSTSGGTAALGCLVKDYFPEPVTVSWNSGALTSGVHTFPAVLQSSGLYSLSSVVTVPSSSLGTQTYICNVNHKPSNTKVDKKV

SEQ ID NO: 331 - protein, 219 aa, Artificial Sequence
  Description of Artificial Sequence: Synthetic polypeptide
DIQMTQSPDSLAVSLGERATINCKSSQSVLYSSNNKNYLAWYQQKPGQPPKLLIYLASTRESGVPDRFSGSGSGTDFTLTISSLQAEDVAVYYCQQYYSTWTFGQGTKVEIKRTVAAPSVFIFPPSDEQLKSGTASVVCLLNNFYPREAKVQWKVDNALQSGNSQESVTEQDSKDSTYSLSSTLTLSKADYEKHKVYACEVTHQGLSSPVTKSFNRGEC

SEQ ID NO: 332 - protein, 261 aa, Artificial Sequence
  Description of Artificial Sequence: Synthetic polypeptide
EVQLLESGGGLVQPGGSLRLSCAASGFTFSNYPMYWVRQAPGKGLEWVSRISSSGGRTVYADSVKGRFTISRDNSKNTLYLQMNSLRAEDTAVYYCARDRWSRSAAEYGLGGYWGQGTLVTVSSASTGGGGSGGGGSGGGGSGGGGSDIQMTQSPDSLAVSLGERATINCKSSQSVLYSSNNKNYLAWYQQKPGQPPKLLIYLASTRESGVPDRFSGSGSGTDFTLTISSLQAEDVAVYYCQQYYSTWTFGQGTKVEIKRT

SEQ ID NO: 333 - protein, 218 aa, Artificial Sequence
  Description of Artificial Sequence: Synthetic polypeptide
EVQLLESGGGLVQPGGSLRLSCAASGFTFSIYRMQWVRQAPGKGLEWVSGISPSGGTTWYADSVKGRFTISRDNSKNTLYLQMNSLRAEDTAVYYCARWSGGSGYAFDIWGQGTMVTVSSASTKGPSVFPLAPSSKSTSGGTAALGCLVKDYFPEPVTVSWNSGALTSGVHTFPAVLQSSGLYSLSSVVTVPSSSLGTQTYICNVNHKPSNTKVDKKV

SEQ ID NO: 334 - protein, 214 aa, Artificial Sequence
  Description of Artificial Sequence: Synthetic polypeptide
DIQMTQSPLSLSASVGDRVTITCQASRDIRNYLNWYQQKPGKAPKLLIYDASSLQTGVPSRFGGSGSGTDFSFTIGSLQPEDIATYYCQQFDSLPHTFGQGTKLEIKRTVAAPSVFIFPPSDEQLKSGTASVVCLLNNFYPREAKVQWKVDNALQSGNSQESVTEQDSKDSTYSLSSTLTLSKADYEKHKVYACEVTHQGLSSPVTKSFNRGEC

SEQ ID NO: 335 - protein, 252 aa, Artificial Sequence
  Description of Artificial Sequence: Synthetic polypeptide
EVQLLESGGGLVQPGGSLRLSCAASGFTFSIYRMQWVRQAPGKGLEWVSGISPSGGTTWYADSVKGRFTISRDNSKNTLYLQMNSLRAEDTAVYYCARWSGGSGYAFDIWGQGTMVTVSSASTGGGGSGGGGSGGGGSGGGGSDIQMTQSPLSLSASVGDRVTITCQASRDIRNYLNWYQQKPGKAPKLLIYDASSLQTGVPSRFGGSGSGTDFSFTIGSLQPEDIATYYCQQFDSLPHTFGQGTKLEIKRT

SEQ ID NO: 336 - protein, 215 aa, Artificial Sequence
  Description of Artificial Sequence: Synthetic polypeptide
QVQLQQWGAGLLKPSETLSLTCAVYGGSFSGYYWSWIRQPPGKGLEWIGEINHSGSTNYNPSLKSRVTISVETSKNQFSLKLSSVTAADTAVYYCARDKWTWYFDLWGRGTLVTVSSASTKGPSVFPLAPSSKSTSGGTAALGCLVKDYFPEPVTVSWNSGALTSGVHTFPAVLQSSGLYSLSSVVTVPSSSLGTQTYICNVNHKPSNTKVDKKV

SEQ ID NO: 337 - protein, 220 aa, Artificial Sequence
  Description of Artificial Sequence: Synthetic polypeptide
DIEMTQSPDSLAVSLGERATINCRSSQSVLYSSSNRNYLAWYQQNPGQPPKLLIYWASTRESGVPDRFSGSGSGTDFTLTISSLQAEDVAVYYCQQYYSTPRTFGQGTKVEIKRTVAAPSVFIFPPSDEQLKSGTASVVCLLNNFYPREAKVQWKVDNALQSGNSQESVTEQDSKDSTYSLSSTLTLSKADYEKHKVYACEVTHQGLSSPVTKSFNRGEC

SEQ ID NO: 338 - protein, 255 aa, Artificial Sequence
  Description of Artificial Sequence: Synthetic polypeptide
QVQLQQWGAGLLKPSETLSLTCAVYGGSFSGYYWSWIRQPPGKGLEWIGEINHSGSTNYNPSLKSRVTISVETSKNQFSLKLSSVTAADTAVYYCARDKWTWYFDLWGRGTLVTVSSASTGGGGSGGGGSGGGGSGGGGSDIEMTQSPDSLAVSLGERATINCRSSQSVLYSSSNRNYLAWYQQNPGQPPKLLIYWASTRESGVPDRFSGSGSGTDFTLTISSLQAEDVAVYYCQQYYSTPRTFGQGTKVEIKRT

SEQ ID NO: 339 - protein, 216 aa, Artificial Sequence
  Description of Artificial Sequence: Synthetic polypeptide
QVQLQESGGGLVKPGGSLRLSCAASGFTFSSYWMSWVRQAPGKGLEWVANINRDGSASYYVDSVKGRFTISRDDAKNSLYLQMNSLRAEDTAVYYCARDRGVGYFDLWGRGTLVTVSSASTKGPSVFPLAPSSKSTSGGTAALGCLVKDYFPEPVTVSWNSGALTSGVHTFPAVLQSSGLYSLSSVVTVPSSSLGTQTYICNVNHKPSNTKVDKKV

SEQ ID NO: 340 - protein, 217 aa, Artificial Sequence
  Description of Artificial Sequence: Synthetic polypeptide
QSALTQPASVSGSPGQSITISCTGTSSDVGGYNFVSWYQQHPGKAPKLMIYDVSDRPSGVSDRFSGSKSGNTASLIISGLQADDEADYYCSSYGSSSTHVIFGGGTKVTVLGQPKAAPSVTLFPPSSEELQANKATLVCLISDFYPGAVTVAWKADSSPVKAGVETTTPSKQSNNKYAASSYLSLTPEQWKSHRSYSCQVTHEGSTVEKTVAPAECS

SEQ ID NO: 341 - protein, 253 aa, Artificial Sequence
  Description of Artificial Sequence: Synthetic polypeptide
QVQLQESGGGLVKPGGSLRLSCAASGFTFSSYWMSWVRQAPGKGLEWVANINRDGSASYYVDSVKGRFTISRDDAKNSLYLQMNSLRAEDTAVYYCARDRGVGYFDLWGRGTLVTVSSASTGGGGSGGGGSGGGGSGGGGSQSALTQPASVSGSPGQSITISCTGTSSDVGGYNFVSWYQQHPGKAPKLMIYDVSDRPSGVSDRFSGSKSGNTASLIISGLQADDEADYYCSSYGSSSTHVIFGGGTKVTVLG

SEQ ID NO: 342 - protein, 216 aa, Artificial Sequence
  Description of Artificial Sequence: Synthetic polypeptide
EVQLLESGGGLVQPGGSLRLSCAASGFTFSAYNMRWVRQAPGKGLEWVSVIYPSGGATRYADSVKGRFTISRDNSKNTLYLQMNSLRAEDTAVYYCARGYYYYGMDVWGQGTLVTVSSASTKGPSVFPLAPSSKSTSGGTAALGCLVKDYFPEPVTVSWNSGALTSGVHTFPAVLQSSGLYSLSSVVTVPSSSLGTQTYICNVNHKPSNTKVDKKV

SEQ ID NO: 343 - protein, 216 aa, Artificial Sequence
  Description of Artificial Sequence: Synthetic polypeptide
QSVLTQPPSASGTPGQRVTISCSGSDSNIGRNYIYWYQQFPGTAPKLLIYRNNQRPSGVPDRISGSKSGTSASLAISGLRSEDEAEYHCGTWDDSLSGPVFGGGTKLTVLGQPKAAPSVTLFPPSSEELQANKATLVCLISDFYPGAVTVAWKADSSPVKAGVETTTPSKQSNNKYAASSYLSLTPEQWKSHRSYSCQVTHEGSTVEKTVAPAECS

SEQ ID NO: 344 - protein, 252 aa, Artificial Sequence
  Description of Artificial Sequence: Synthetic polypeptide
EVQLLESGGGLVQPGGSLRLSCAASGFTFSAYNMRWVRQAPGKGLEWVSVIYPSGGATRYADSVKGRFTISRDNSKNTLYLQMNSLRAEDTAVYYCARGYYYYGMDVWGQGTLVTVSSASTGGGGSGGGGSGGGGSGGGGSQSVLTQPPSASGTPGQRVTISCSGSDSNIGRNYIYWYQQFPGTAPKLLIYRNNQRPSGVPDRISGSKSGTSASLAISGLRSEDEAEYHCGTWDDSLSGPVFGGGTKLTVLG

SEQ ID NO: 345 - protein, 220 aa, Artificial Sequence
  Description of Artificial Sequence: Synthetic polypeptide
EVQLLESGGGLVQPGGSLRLSCAASGFTFSAYGMGWVRQAPGKGLEWVSYISPSGGHTKYADSVKGRFTISRDNSKNTLYLQMNSLRAEDTAVYYCAKVLETGLLVDAFDIWGQGTMVTVSSASTKGPSVFPLAPSSKSTSGGTAALGCLVKDYFPEPVTVSWNSGALTSGVHTFPAVLQSSGLYSLSSVVTVPSSSLGTQTYICNVNHKPSNTKVDKKV

SEQ ID NO: 346 - protein, 212 aa, Artificial Sequence
  Description of Artificial Sequence: Synthetic polypeptide
QYELTQPPSVSVYPGQTASITCSGDQLGSKFVSWYQQRPGQSPVLVMYKDKRRPSEIPERFSGSNSGNTATLTISGTQAIDEADYYCQAWDSSTYVFGTGTKVTVLGQPKAAPSVTLFPPSSEELQANKATLVCLISDFYPGAVTVAWKADSSPVKAGVETTTPSKQSNNKYAASSYLSLTPEQWKSHRSYSCQVTHEGSTVEKTVAPAECS

SEQ ID NO: 347 - protein, 252 aa, Artificial Sequence
  Description of Artificial Sequence: Synthetic polypeptide
EVQLLESGGGLVQPGGSLRLSCAASGFTFSAYGMGWVRQAPGKGLEWVSYISPSGGHTKYADSVKGRFTISRDNSKNTLYLQMNSLRAEDTAVYYCAKVLETGLLVDAFDIWGQGTMVTVSSASTGGGGSGGGGSGGGGSGGGGSQYELTQPPSVSVYPGQTASITCSGDQLGSKFVSWYQQRPGQSPVLVMYKDKRRPSEIPERFSGSNSGNTATLTISGTQAIDEADYYCQAWDSSTYVFGTGTKVTVLG

SEQ ID NO: 348 - protein, 216 aa, Artificial Sequence
  Description of Artificial Sequence: Synthetic polypeptide
EVQLLESGGGLVQPGGSLRLSCAASGFTFSWYGMGWVRQAPGKGLEWVSYISPSGGITVYADSVKGRFTISRDNSKNTLYLQMNSLRAEDTAVYYCARLNYYYGLDVWGQGTTVTVSSASTKGPSVFPLAPSSKSTSGGTAALGCLVKDYFPEPVTVSWNSGALTSGVHTFPAVLQSSGLYSLSSVVTVPSSSLGTQTYICNVNHKPSNTKVDKKV

SEQ ID NO: 349 - protein, 214 aa, Artificial Sequence
  Description of Artificial Sequence: Synthetic polypeptide
DIQMTQSPSSLSASVGDRITITCQASQDIGDSLNWYQQKPGKAPRLLIYDASNLETGVPPRFSGSGSGTDFTFTFRSLQPEDIATYFCQQSANAPFTFGPGTKVDIKRTVAAPSVFIFPPSDEQLKSGTASVVCLLNNFYPREAKVQWKVDNALQSGNSQESVTEQDSKDSTYSLSSTLTLSKADYEKHKVYACEVTHQGLSSPVTKSFNRGEC

SEQ ID NO: 350 - protein, 250 aa, Artificial Sequence
  Description of Artificial Sequence: Synthetic polypeptide
EVQLLESGGGLVQPGGSLRLSCAASGFTFSWYGMGWVRQAPGKGLEWVSYISPSGGITVYADSVKGRFTISRDNSKNTLYLQMNSLRAEDTAVYYCARLNYYYGLDVWGQGTTVTVSSASTGGGGSGGGGSGGGGSGGGGSDIQMTQSPSSLSASVGDRITITCQASQDIGDSLNWYQQKPGKAPRLLIYDASNLETGVPPRFSGSGSGTDFTFTFRSLQPEDIATYFCQQSANAPFTFGPGTKVDIKRT

SEQ ID NO: 351 - protein, 217 aa, Artificial Sequence
  Description of Artificial Sequence: Synthetic polypeptide
EVQLLESGGGLVQPGGSLRLSCAASGFTFSRYGMWWVRQAPGKGLEWVSYIGSSGGPTYYVDSVKGRFTISRDNSKNTLYLQMNSLRAEDTAVYYCAGGRGTPYYFDSWGQGTLVTVSSASTKGPSVFPLAPSSKSTSGGTAALGCLVKDYFPEPVTVSWNSGALTSGVHTFPAVLQSSGLYSLSSVVTVPSSSLGTQTYICNVNHKPSNTKVDKKV

SEQ ID NO: 352 - protein, 216 aa, Artificial Sequence
  Description of Artificial Sequence: Synthetic polypeptide
QYELTQPASVSGSPGQSITISCTGTSSDIGRWNIVSWYQQHPGKAPKLMIYDVSNRPSGVSNRFSGSKSGNTASLTISGLQAEDEADYYCSSYTSSSTWVFGGGTKLTVLGQPKAAPSVTLFPPSSEELQANKATLVCLISDFYPGAVTVAWKADSSPVKAGVETTTPSKQSNNKYAASSYLSLTPEQWKSHRSYSCQVTHEGSTVEKTVAPAECS

SEQ ID NO: 353 - protein, 253 aa, Artificial Sequence
  Description of Artificial Sequence: Synthetic polypeptide
EVQLLESGGGLVQPGGSLRLSCAASGFTFSRYGMWWVRQAPGKGLEWVSYIGSSGGPTYYVDSVKGRFTISRDNSKNTLYLQMNSLRAEDTAVYYCAGGRGTPYYFDSWGQGTLVTVSSASTGGGGSGGGGSGGGGSGGGGSQYELTQPASVSGSPGQSITISCTGTSSDIGRWNIVSWYQQHPGKAPKLMIYDVSNRPSGVSNRFSGSKSGNTASLTISGLQAEDEADYYCSSYTSSSTWVFGGGTKLTVLG

SEQ ID NO: 354 - DNA, 2154 bp, Artificial Sequence
  Description of Artificial Sequence: Synthetic polynucleotide
gaggtccagctcgtcgagtcaggtggaggactggtgcaacccggtcgatcacttcggctgtcgtgtgcggcatcgggattcacgtttgacgattatgccatgcattgggtgcgacaagctccgggcaaagggcttgaatgggtgtccggaatctcgtgggattcggggtcagtgggctatgccgattccgtaaagggtaggttcaccatctcacgcgacaatgcgaagaattcgttgtatcttcagatgaattcgcttagggcagaagatacggccttgtactattgcgcaagggaccttggggcgtaccagtgggaggagggtttcgattactggggtcagggaaccctggtaacggtgtcgagcgctagcactaagggaccgtccgtgtttcccctcgcgccttgcagccgctcgacgagcgaatcgacagcggcgctcggctgtctcgtcaaagactacttccccgagccggtgaccgtgagctggaattccggagcgttgacctcaggggtgcatacattccctgccgtactgcaatcatcagggctctactcattgtcgagcgtagtgactgtaccgtcgtcaaacttcggaacgcagacgtacacatgtaatgtcgatcacaagccctccaatactaaggtagataagaccgtagaacgaaagtgttgtgtcgaatgccctccgtgccccgcaccaccggtcgcgggtccatcagtctttctgttcccgccaaagcccaaagacacactgatgatttcgcgcacgcccgaagtcacttgcgtcgtggtggatgtgtcgcatgaggacccggaggtccaattcaactggtacgtcgatggtgtagaagtccacaacgccaagaccaagcctcgggaggagcagttcaactccacctttcgggtagtgagcgtgcttacagtagtgcatcaggactggctgaacggcaaagaatacaaatgcaaagtcagcaacaaaggactgccagcgcccatcgagaaaacaattagcaaaactaaagggcagcccagagaacctcaagtgtatacattgccgccgtcgcgggaggaaatgacaaagaatcaggtatccctgacgtgtcttgtgaaaggcttttacccatccgacattgcggtagagtgggagtcgaatgggcaacccgagaacaactataagacgactcccccaatgttggattcagacggatcctttttcttgtactcgaaactcacagtcgacaagtccagatggcagcaggggaacgtgttcagctgcagcgtgatgcacgaggcccttcacaaccactatacgcagaaatcattaagcttatcgcccggaggaggtgggggttccgggggtgggggatccggtggaggagggtccgaggtccaactgctgcagtccggcggagggctcgtgcagcctggcggtagcctgagactttcgtgtgcggccagcgggtttgacttttcatcatatcccatgcactgggtgagacaagctccggggaaaggtcttgaatgggtcggctccatttcgtcatcgggtggtgcgaccccgtacgccgattcggtgaagggacgattcaccatctcgcgggataactcgaagaacactctttatctccagatgaattcgctgaggcccgaagatacggcagtgtattactgtgcgaaagacttctatacgattttgactggcaatgcattcgacatgtggggccagggaacgtcggtaacagtctcaagcgcatcaacaggtggtggagggtcgggaggaggaggaagcggtgggggagggtcagggggaggcggatcggacatccagatgacccagtccccttcctcgctctccgcgtccttgggtgaccgcgtaacgatcacatgcagagcaagccaaggaatttcaagctatcttgcgtggtatcagcagaagccgggtaaagcgcccaagttgttgatctacgccagctccacaaggcagtcgggggtcccctcacgcttttcggggtcgggctcgggaactgacttcaccttgacgatctccagcctccagccagaggattcagggacctactactgccaacagtactgggcgtttcccctgacattcggagggggaacaaaagtagagatcaagcggacgtgataa

SEQ ID NO: 355 - protein, 716 aa, Artificial Sequence
  Description of Artificial Sequence: Synthetic polypeptide
EVQLVESGGGLVQPGRSLRLSCAASGFTFDDYAMHWVRQAPGKGLEWVSGISWDSGSVGYADSVKGRFTISRDNAKNSLYLQMNSLRAEDTALYYCARDLGAYQWEEGFDYWGQGTLVTVSSASTKGPSVFPLAPCSRSTSESTAALGCLVKDYFPEPVTVSWNSGALTSGVHTFPAVLQSSGLYSLSSVVTVPSSNFGTQTYTCNVDHKPSNTKVDKTVERKCCVECPPCPAPPVAGPSVFLFPPKPKDTLMISRTPEVTCVVVDVSHEDPEVQFNWYVDGVEVHNAKTKPREEQFNSTFRVVSVLTVVHQDWLNGKEYKCKVSNKGLPAPIEKTISKTKGQPREPQVYTLPPSREEMTKNQVSLTCLVKGFYPSDIAVEWESNGQPENNYKTTPPMLDSDGSFFLYSKLTVDKSRWQQGNVFSCSVMHEALHNHYTQKSLSLSPGGGGGSGGGGSGGGGSEVQLLQSGGGLVQPGGSLRLSCAASGFDFSSYPMHWVRQAPGKGLEWVGSISSSGGATPYADSVKGRFTISRDNSKNTLYLQMNSLRPEDTAVYYCAKDFYTILTGNAFDMWGQGTSVTVSSASTGGGGSGGGGSGGGGSGGGGSDIQMTQSPSSLSASLGDRVTITCRASQGISSYLAWYQQKPGKAPKLLIYASSTRQSGVPSRFSGSGSGTDFTLTISSLQPEDSGTYYCQQYWAFPLTFGGGTKVEIKRT

SEQ ID NO: 356 - DNA, 2154 bp, Artificial Sequence
  Description of Artificial Sequence: Synthetic polynucleotide
gaggtccagctcgtcgagtcaggtggaggactggtgcaacccggtcgatcacttcggctgtcgtgtgcggcatcgggattcacgtttgacgattatgccatgcattgggtgcgacaagctccgggcaaagggcttgaatgggtgtccggaatctcgtgggattcggggtcagtgggctatgccgattccgtaaagggtaggttcaccatctcacgcgacaatgcgaagaattcgttgtacctccaaatgaattcgcttagggcagaagatacggccttgtactattgcgcaagggaccttgggtacaaccagtggtgggaaggtttcgattactggggtcagggaaccctggtaacggtgtcgagcgctagcactaagggaccgtccgtgtttcccctcgcgccttgcagccgctcgacgagcgaatcgacagcggcgctcggctgtctcgtcaaagactacttccccgagccggtgaccgtgagctggaattccggagcgttgacctcaggggtgcatacattccctgccgtactgcaatcatcagggctctactcattgtcgagcgtagtgactgtaccgtcgtcaaacttcggaacgcagacgtacacatgtaatgtcgatcacaagccctccaatactaaggtagataagaccgtagaacgaaagtgttgtgtcgaatgccctccgtgccccgcaccaccggtcgcgggtccatcagtctttctgttcccgccaaagcccaaagacacactgatgatttcgcgcacgcccgaagtcacttgcgtcgtggtggatgtgtcgcatgaggacccggaggtccaattcaactggtacgtcgatggtgtagaagtccacaacgccaagaccaagcctcgggaggagcagttcaactccacctttcgggtagtgagcgtgcttacagtagtgcatcaggactggctgaacggcaaagaatacaaatgcaaagtcagcaacaaaggactgccagcgcccatcgagaaaacaattagcaaaactaaagggcagcccagagaacctcaagtgtatacattgccgccgtcgcgggaggaaatgacaaagaatcaggtatccctgacgtgtcttgtgaaaggcttttacccatccgacattgcggtagagtgggagtcgaatgggcaacccgagaacaactataagacgactcccccaatgttggattcagacggatcctttttcttgtactcgaaactcacagtcgacaagtccagatggcagcaggggaacgtgttcagctgcagcgtgatgcacgaggcccttcacaaccactatacgcagaaatcattaagcttatcgcccggaggaggtgggggttccgggggtgggggatccggtggaggagggtccgaggtccaactgctgcagtccggcggagggctcgtgcagcctggcggtagcctgagactttcgtgtgcggccagcgggtttgacttttcatcatatcccatgcactgggtgagacaagctccggggaaaggtcttgaatgggtcggctccatttcgtcatcgggtggtgcgaccccgtacgccgattcggtgaagggacgattcaccatctcgcgggataactcgaagaacactctttatctccagatgaattcgctgaggcccgaagatacggcagtgtattactgtgcgaaagacttctatacgattttgactggcaatgcattcgacatgtggggccagggaacgtcggtaacagtctcaagcgcatcaacaggtggtggagggtcgggaggaggaggaagcggtgggggagggtcagggggaggcggatcggacatccagatgacccagtccccttcctcgctctccgcgtccttgggtgaccgcgtaacgatcacatgcagagcaagccaaggaatttcaagctatcttgcgtggtatcagcagaagccgggtaaagcgcccaagttgttgatctacgccagctccacaaggcagtcgggggtcccctcacgcttttcggggtcgggctcgggaactgacttcaccttgacgatctccagcctccagccagaggattcagggacctactactgccaacagtactgggcgtttcccctgacattcggagggggaacaaaagtagagatcaagcggacgtgataa

SEQ ID NO: 357 - protein, 716 aa, Artificial Sequence
  Description of Artificial Sequence: Synthetic polypeptide
EVQLVESGGGLVQPGRSLRLSCAASGFTFDDYAMHWVRQAPGKGLEWVSGISWDSGSVGYADSVKGRFTISRDNAKNSLYLQMNSLRAEDTALYYCARDLGYNQWWEGFDYWGQGTLVTVSSASTKGPSVFPLAPCSRSTSESTAALGCLVKDYFPEPVTVSWNSGALTSGVHTFPAVLQSSGLYSLSSVVTVPSSNFGTQTYTCNVDHKPSNTKVDKTVERKCCVECPPCPAPPVAGPSVFLFPPKPKDTLMISRTPEVTCVVVDVSHEDPEVQFNWYVDGVEVHNAKTKPREEQFNSTFRVVSVLTVVHQDWLNGKEYKCKVSNKGLPAPIEKTISKTKGQPREPQVYTLPPSREEMTKNQVSLTCLVKGFYPSDIAVEWESNGQPENNYKTTPPMLDSDGSFFLYSKLTVDKSRWQQGNVFSCSVMHEALHNHYTQKSLSLSPGGGGGSGGGGSGGGGSEVQLLQSGGGLVQPGGSLRLSCAASGFDFSSYPMHWVRQAPGKGLEWVGSISSSGGATPYADSVKGRFTISRDNSKNTLYLQMNSLRPEDTAVYYCAKDFYTILTGNAFDMWGQGTSVTVSSASTGGGGSGGGGSGGGGSGGGGSDIQMTQSPSSLSASLGDRVTITCRASQGISSYLAWYQQKPGKAPKLLIYASSTRQSGVPSRFSGSGSGTDFTLTISSLQPEDSGTYYCQQYWAFPLTFGGGTKVEIKRT

SEQ ID NO: 358 - protein, 451 aa, Artificial Sequence
  Description of Artificial Sequence: Synthetic polypeptide
EVQLLQSGGGLVQPGGSLRLSCAASGFTFSVYPMHWVRQAPGKGLEWVSSISSSGGATRYADSVKGRFTISRDNSKNTLYLQMNSLRAEDTAVYYCAKDFYDILTGNAFDIWGQGTTVTVSSASTKGPSVFPLAPSSKSTSGGTAALGCLVKDYFPEPVTVSWNSGALTSGVHTFPAVLQSSGLYSLSSVVTVPSSSLGTQTYICNVNHKPSNTKVDKKVEPKSCDKTHTCPPCPAPELLGGPSVFLFPPKPKDTLMISRTPEVTCVVVDVSHEDPEVKFNWYVDGVEVHNAKTKPREEQYNSTYRVVSVLTVLHQDWLNGKEYKCKVSNKALPAPIEKTISKAKGQPREPQVYTLPPSREEMTKNQVSLTCLVKGFYPSDIAVEWESNGQPENNYKTTPPVLDSDGSFFLYSKLTVDKSRWQQGNVFSCSVMHEALHNHYTQKSLSLSPG

SEQ ID NO: 359 - protein, 451 aa, Artificial Sequence
  Description of Artificial Sequence: Synthetic polypeptide
EVQLLQSGGGLVQPGGSLRLSCAASGFMFSRYPMHWVRQAPGKGLEWVGSISGSGGATPYADSVKGRFTISRDNSKNTLYLQMNSLRAEDTAVYYCAKDFYQILTGNAFDYWGQGTTVTVSSASTKGPSVFPLAPSSKSTSGGTAALGCLVKDYFPEPVTVSWNSGALTSGVHTFPAVLQSSGLYSLSSVVTVPSSSLGTQTYICNVNHKPSNTKVDKKVEPKSCDKTHTCPPCPAPELLGGPSVFLFPPKPKDTLMISRTPEVTCVVVDVSHEDPEVKFNWYVDGVEVHNAKTKPREEQYNSTYRVVSVLTVLHQDWLNGKEYKCKVSNKALPAPIEKTISKAKGQPREPQVYTLPPSREEMTKNQVSLTCLVKGFYPSDIAVEWESNGQPENNYKTTPPVLDSDGSFFLYSKLTVDKSRWQQGNVFSCSVMHEALHNHYTQKSLSLSPG

SEQ ID NO: 360 - protein, 451 aa, Artificial Sequence
  Description of Artificial Sequence: Synthetic polypeptide
EVQLLQSGGGLVQPGGSLRLSCAASGFDFSSYPMHWVRQAPGKGLEWVGSISSSGGATPYADSVKGRFTISRDNSKNTLYLQMNSLRPEDTAVYYCAKDFYTILTGNAFDMWGQGTSVTVSSASTKGPSVFPLAPSSKSTSGGTAALGCLVKDYFPEPVTVSWNSGALTSGVHTFPAVLQSSGLYSLSSVVTVPSSSLGTQTYICNVNHKPSNTKVDKKVEPKSCDKTHTCPPCPAPELLGGPSVFLFPPKPKDTLMISRTPEVTCVVVDVSHEDPEVKFNWYVDGVEVHNAKTKPREEQYNSTYRVVSVLTVLHQDWLNGKEYKCKVSNKALPAPIEKTISKAKGQPREPQVYTLPPSREEMTKNQVSLTCLVKGFYPSDIAVEWESNGQPENNYKTTPPVLDSDGSFFLYSKLTVDKSRWQQGNVFSCSVMHEALHNHYTQKSLSLSPG

SEQ ID NO: 361 - protein, 451 aa, Artificial Sequence
  Description of Artificial Sequence: Synthetic polypeptide
EVQLLQSGGGLVQPGGSLRLSCAASGFFFSKYPMHWVRQAPGKGLEWVSSISSDGGATVYADSVKGRFTISRDNSKNTLYLQMNSLRAEDTAVYYCAKDFYTWLTGNAFDSWGQGTSVTVSSASTKGPSVFPLAPSSKSTSGGTAALGCLVKDYFPEPVTVSWNSGALTSGVHTFPAVLQSSGLYSLSSVVTVPSSSLGTQTYICNVNHKPSNTKVDKKVEPKSCDKTHTCPPCPAPELLGGPSVFLFPPKPKDTLMISRTPEVTCVVVDVSHEDPEVKFNWYVDGVEVHNAKTKPREEQYNSTYRVVSVLTVLHQDWLNGKEYKCKVSNKALPAPIEKTISKAKGQPREPQVYTLPPSREEMTKNQVSLTCLVKGFYPSDIAVEWESNGQPENNYKTTPPVLDSDGSFFLYSKLTVDKSRWQQGNVFSCSVMHEALHNHYTQKSLSLSPG

SEQ ID NO: 362 - protein, 451 aa, Artificial Sequence
  Description of Artificial Sequence: Synthetic polypeptide
EVQLVESGGGLVQPGRSLRLSCAASGFTFDDYAMHWVRQAPGKGLEWVSGISWDSGSTGYADSVKGRFTISRDNAKNSLYLQMNSLRAEDTALYYCARDLGAYQWVEGFDYWGQGTLVTVSSASTKGPSVFPLAPSSKSTSGGTAALGCLVKDYFPEPVTVSWNSGALTSGVHTFPAVLQSSGLYSLSSVVTVPSSSLGTQTYICNVNHKPSNTKVDKKVEPKSCDKTHTCPPCPAPELLGGPSVFLFPPKPKDTLMISRTPEVTCVVVDVSHEDPEVKFNWYVDGVEVHNAKTKPREEQYNSTYRVVSVLTVLHQDWLNGKEYKCKVSNKALPAPIEKTISKAKGQPREPQVYTLPPSREEMTKNQVSLTCLVKGFYPSDIAVEWESNGQPENNYKTTPPVLDSDGSFFLYSKLTVDKSRWQQGNVFSCSVMHEALHNHYTQKSLSLSPG

SEQ ID NO: 363 - protein, 451 aa, Artificial Sequence
  Description of Artificial Sequence: Synthetic polypeptide
EVQLVESGGGLVQPGRSLRLSCAASGFTFDDYAMHWVRQAPGKGLEWVSGISWNSGSTGYADSVKGRFTISRDNAKNSLYLQMNSLRAEDTALYYCARDLGFNQWVDGFDYWGQGTLVTVSSASTKGPSVFPLAPSSKSTSGGTAALGCLVKDYFPEPVTVSWNSGALTSGVHTFPAVLQSSGLYSLSSVVTVPSSSLGTQTYICNVNHKPSNTKVDKKVEPKSCDKTHTCPPCPAPELLGGPSVFLFPPKPKDTLMISRTPEVTCVVVDVSHEDPEVKFNWYVDGVEVHNAKTKPREEQYNSTYRVVSVLTVLHQDWLNGKEYKCKVSNKALPAPIEKTISKAKGQPREPQVYTLPPSREEMTKNQVSLTCLVKGFYPSDIAVEWESNGQPENNYKTTPPVLDSDGSFFLYSKLTVDKSRWQQGNVFSCSVMHEALHNHYTQKSLSLSPG

SEQ ID NO: 364 - protein, 451 aa, Artificial Sequence
  Description of Artificial Sequence: Synthetic polypeptide
EVQLVESGGGLVQPGRSLRLSCAASGFTFDDYAMHWVRQAPGKGLEWVSGISWDSGSVGYADSVKGRFTISRDNAKNSLYLQMNSLRAEDTALYYCARDLGYNQWWEGFDYWGQGTLVTVSSASTKGPSVFPLAPSSKSTSGGTAALGCLVKDYFPEPVTVSWNSGALTSGVHTFPAVLQSSGLYSLSSVVTVPSSSLGTQTYICNVNHKPSNTKVDKKVEPKSCDKTHTCPPCPAPELLGGPSVFLFPPKPKDTLMISRTPEVTCVVVDVSHEDPEVKFNWYVDGVEVHNAKTKPREEQYNSTYRVVSVLTVLHQDWLNGKEYKCKVSNKALPAPIEKTISKAKGQPREPQVYTLPPSREEMTKNQVSLTCLVKGFYPSDIAVEWESNGQPENNYKTTPPVLDSDGSFFLYSKLTVDKSRWQQGNVFSCSVMHEALHNHYTQKSLSLSPG

SEQ ID NO: 365 - protein, 451 aa, Artificial Sequence
  Description of Artificial Sequence: Synthetic polypeptide
EVQLVESGGGLVQPGRSLRLSCAASGFTFDDYAMHWVRQAPGKGLEWVSGISWNSGSRGYADSVKGRFTISRDNAKNSLYLQMNSLRAEDTALYYCARDLGFNQWEEGFDYWGQGTLVTVSSASTKGPSVFPLAPSSKSTSGGTAALGCLVKDYFPEPVTVSWNSGALTSGVHTFPAVLQSSGLYSLSSVVTVPSSSLGTQTYICNVNHKPSNTKVDKKVEPKSCDKTHTCPPCPAPELLGGPSVFLFPPKPKDTLMISRTPEVTCVVVDVSHEDPEVKFNWYVDGVEVHNAKTKPREEQYNSTYRVVSVLTVLHQDWLNGKEYKCKVSNKALPAPIEKTISKAKGQPREPQVYTLPPSREEMTKNQVSLTCLVKGFYPSDIAVEWESNGQPENNYKTTPPVLDSDGSFFLYSKLTVDKSRWQQGNVFSCSVMHEALHNHYTQKSLSLSPG

SEQ ID NO: 366 - protein, 451 aa, Artificial Sequence
  Description of Artificial Sequence: Synthetic polypeptide
EVQLVESGGGLVQPGRSLRLSCAASGFTFDDYAMHWVRQAPGKGLEWVSGISWDSGSVGYADSVKGRFTISRDNAKNSLYLQMNSLRAEDTALYYCARDLGAYQWEEGFDYWGQGTLVTVSSASTKGPSVFPLAPSSKSTSGGTAALGCLVKDYFPEPVTVSWNSGALTSGVHTFPAVLQSSGLYSLSSVVTVPSSSLGTQTYICNVNHKPSNTKVDKKVEPKSCDKTHTCPPCPAPELLGGPSVFLFPPKPKDTLMISRTPEVTCVVVDVSHEDPEVKFNWYVDGVEVHNAKTKPREEQYNSTYRVVSVLTVLHQDWLNGKEYKCKVSNKALPAPIEKTISKAKGQPREPQVYTLPPSREEMTKNQVSLTCLVKGFYPSDIAVEWESNGQPENNYKTTPPVLDSDGSFFLYSKLTVDKSRWQQGNVFSCSVMHEALHNHYTQKSLSLSPG

SEQ ID NO: 367 - protein, 254 aa, Artificial Sequence
  Description of Artificial Sequence: Synthetic polypeptide
EVQLLQSGGGLVQPGGSLRLSCAASGFMFSRYPMHWVRQAPGKGLEWVGSISGSGGATPYADSVKGRFTISRDNSKNTLYLQMNSLRAEDTAVYYCAKDFYQILTGNAFDYWGQGTTVTVSSASTGGGGSGGGGSGGGGSGGGGSDIQMTQSPSSLSASLGDRVTITCRASQGISSYLAWYQQKPGKAPKLLIYAKSTLQSGVPSRFSGSGSGTDFTLTISSLQPEDSATYYCQQYWTFPLTFGGGTKVEIKRT

SEQ ID NO: 368 - protein, 254 aa, Artificial Sequence
  Description of Artificial Sequence: Synthetic polypeptide
EVQLLQSGGGLVQPGGSLRLSCAASGFFFSKYPMHWVRQAPGKGLEWVSSISSDGGATVYADSVKGRFTISRDNSKNTLYLQMNSLRAEDTAVYYCAKDFYTWLTGNAFDSWGQGTSVTVSSASTGGGGSGGGGSGGGGSGGGGSDIQLTQSPSSLSASLGDRVTITCRASQGISSYLAWYQQKPGKAPKLLIYARSTRQSGVPSRFSGSGSGTEFTLTISSLQPEDSATYYCQQYWTWPLTFGGGTKVEIKRT

SEQ ID NO: 369 - protein, 254 aa, Artificial Sequence
  Description of Artificial Sequence: Synthetic polypeptide
EVQLLQSGGGLVQPGGSLRLSCAASGFDFSSYPMHWVRQAPGKGLEWVGSISSSGGATPYADSVKGRFTISRDNSKNTLYLQMNSLRPEDTAVYYCAKDFYTILTGNAFDMWGQGTSVTVSSASTGGGGSGGGGSGGGGSGGGGSDIQMTQSPSSLSASLGDRVTITCRASQGISSYLAWYQQKPGKAPKLLIYASSTRQSGVPSRFSGSGSGTDFTLTISSLQPEDSGTYYCQQYWAFPLTFGGGTKVEIKRT

SEQ ID NO: 370 - protein, 254 aa, Artificial Sequence
  Description of Artificial Sequence: Synthetic polypeptide
QVQLVQSGGGLVQPGGSLRLSCAASGFTFDDYAMHWVRQAPGKGLEWVAGISWNSGSIGYADSVKGRFTISRDNAKNSLYLQMNSLRPEDTAVYYCARDLGYNQWVEGFDYWGQGTLVTVSSASTGGGGSGGGGSGGGGSGGGGSSYELTQDPAVSVALGQTVRITCQGDSLRSYYASWYQQKPGQAPVLVIYGKNNRPSGIPDRFSGSTSGNSASLTITGAQAEDEADYYCNSRDSSGNHWVFGGGTKVTVLG

SEQ ID NO: 371 - protein, 249 aa, Artificial Sequence
  Description of Artificial Sequence: Synthetic polypeptide
EVQLVESGGGLVQPGRSLRLSCAASGFTFDDYAMHWVRQAPGKGLEWVSGISWDSGSTGYADSVKGRFTISRDNAKNSLYLQMNSLRAEDTALYYCARDLGAYQWVEGFDYWGQGTLVTVSSASTGGGGSGGGGSGGGGSSSELTQDPAVSVALGQTVRITCQGDSLRSYYASWYQQKPGQAPVLVIYGKNNRPSGIPDRFSGSSSGNTASLTITGAQAEDEADYYCESRDSPGNQWVFGGGTKVTVLG

SEQ ID NO: 372 - protein, 254 aa, Artificial Sequence
  Description of Artificial Sequence: Synthetic polypeptide
QVQLVQSGGGLVQPGGSLRLSCAASGFTFDDYAMHWVRQAPGKGLEWVAGISWDSGSTGYADSVKGRFTISRDNAKNSLYLQMNSLRAEDTALYYCARDLGAYQWVEGFDYWGQGTLVTVSSASTGGGGSGGGGSGGGGSGGGGSSYELTQDPAVSVALGQTVRITCQGDSLRSYYASWYQQKPGQAPVLVIYGKNNRPSGIPDRFSGSTSGNSASLTITGAQAEDEADYYCNSRDSPGNQWVFGGGTKVTVLG

SEQ ID NO: 373 - protein, 249 aa, Artificial Sequence
  Description of Artificial Sequence: Synthetic polypeptide
EVQLVESGGGLVQPGRSLRLSCAASGFTFDDYAMHWVRQAPGKGLEWVSGISWNSGSTGYADSVKGRFTISRDNAKNSLYLQMNSLRAEDTALYYCARDLGFNQWVDGFDYWGQGTLVTVSSASTGGGGSGGGGSGGGGSSSELTQDPAVSVALGQTVRITCQGDSLRSYYASWYQQKPGQAPVLVIYGKNNRPSGIPDRFSGSSSGNTASLTITGAQAEDEADYYCNSRDTPGDQWVFGGGTKVTVLG

SEQ ID NO: 374 - protein, 249 aa, Artificial Sequence
  Description of Artificial Sequence: Synthetic polypeptide
EVQLVESGGGLVQPGRSLRLSCAASGFTFDDYAMHWVRQAPGKGLEWVSGISWNSGSTGYADSVKGRFTISRDNAKNSLYLQMNSLRAEDTALYYCARDLGYNQWLEGFDYWGQGTLVTVSSASTGGGGSGGGGSGGGGSSSELTQDPAVSVALGQTVRITCQGDSLRSYYASWYQQKPGQAPVLVIYGKNNRPSGIPDRFSGSSSGNTASLTITGAQAEDEADYYCMSRDHPGNQWVFGGGTKVTVLG

SEQ ID NO: 375 - protein, 249 aa, Artificial Sequence
  Description of Artificial Sequence: Synthetic polypeptide
EVQLVESGGGLVQPGRSLRLSCAASGFTFDDYAMHWVRQAPGKGLEWVSGISWNSGSVGYADSVKGRFTISRDNAKNSLYLQMNSLRAEDTALYYCARDLGYNQWLEGFDYWGQGTLVTVSSASTGGGGSGGGGSGGGGSSSELTQDPAVSVALGQTVRITCQGDSLRSYYASWYQQKPGQAPVLVIYGKNNRPSGIPDRFSGSSSGNTASLTITGAQAEDEADYYCMSRDSPGNQWVFGGGTKVTVLG

SEQ ID NO: 376 - protein, 720 aa, Artificial Sequence
  Description of Artificial Sequence: Synthetic polypeptide
EVQLLQSGGGLVQPGGSLRLSCAASGFMFSRYPMHWVRQAPGKGLEWVSSISGSGGATPYADSVKGRFTISRDNSKNTLYLQMNSLRAEDTAVYYCAKDFYQILTGNAFDYWGQGTTVTVSSASTKGPSVFPLAPSSKSTSGGTAALGCLVKDYFPEPVTVSWNSGALTSGVHTFPAVLQSSGLYSLSSVVTVPSSSLGTQTYICNVNHKPSNTKVDKKVEPKSCDKTHTCPPCPAPELLGGPSVFLFPPKPKDTLMISRTPEVTCVVVDVSHEDPEVKFNWYVDGVEVHNAKTKPREEQYNSTYRVVSVLTVLHQDWLNGKEYKCKVSNKALPAPIEKTISKAKGQPREPQVYTLPPSREEMTKNQVSLTCLVKGFYPSDIAVEWESNGQPENNYKTTPPVLDSDGSFFLYSKLTVDKSRWQQGNVFSCSVMHEALHNHYTQKSLSLSPGGGGGSGGGGSGGGGSQVQLVQSGGGLVQPGGSLRLSCAASGFTFDDYAMHWVRQAPGKGLEWVAGISWDSGSTGYADSVKGRFTISRDNAKNSLYLQMNSLRAEDTALYYCARDLGAYQWVEGFDYWGQGTLVTVSSASTGGGGSGGGGSGGGGSGGGGSSYELTQDPAVSVALGQTVRITCQGDSLRSYYASWYQQKPGQAPVLVIYGKNNRPSGIPDRFSGSTSGNSASLTITGAQAEDEADYYCNSRDSPGNQWVFGGGTKVTVLG

SEQ ID NO: 377 - protein, 720 aa, Artificial Sequence
  Description of Artificial Sequence: Synthetic polypeptide
EVQLLQSGGGLVQPGGSLRLSCAASGFMFSRYPMHWVRQAPGKGLEWVSSISGSGGATPYADSVKGRFTISRDNSKNTLYLQMNSLRAEDTAVYYCAKDFYQILTGNAFDYWGQGTTVTVSSASTKGPSVFPLAPSSKSTSGGTAALGCLVKDYFPEPVTVSWNSGALTSGVHTFPAVLQSSGLYSLSSVVTVPSSSLGTQTYICNVNHKPSNTKVDKKVEPKSCDKTHTCPPCPAPELLGGPSVFLFPPKPKDTLMISRTPEVTCVVVDVSHEDPEVKFNWYVDGVEVHNAKTKPREEQYNSTYRVVSVLTVLHQDWLNGKEYKCKVSNKALPAPIEKTISKAKGQPREPQVYTLPPSREEMTKNQVSLTCLVKGFYPSDIAVEWESNGQPENNYKTTPPVLDSDGSFFLYSKLTVDKSRWQQGNVFSCSVMHEALHNHYTQKSLSLSPGGGGGSGGGGSGGGGSQVQLVQSGGGLVQPGGSLRLSCAASGFTFDDYAMHWVRQAPGKGLEWVAGISWNSGSIGYADSVKGRFTISRDNAKNSLYLQMNSLRPEDTAVYYCARDLGYNQWVEGFDYWGQGTLVTVSSASTGGGGSGGGGSGGGGSGGGGSSYELTQDPAVSVALGQTVRITCQGDSLRSYYASWYQQKPGQAPVLVIYGKNNRPSGIPDRFSGSTSGNSASLTITGAQAEDEADYYCNSRDSSGNHWVFGGGTKVTVLG

SEQ ID NO: 378 - protein, 720 aa, Artificial Sequence
  Description of Artificial Sequence: Synthetic polypeptide
EVQLLQSGGGLVQPGGSLRLSCAASGFFFSKYPMHWVRQAPGKGLEWVSSISSDGGATVYADSVKGRFTISRDNSKNTLYLQMNSLRAEDTAVYYCAKDFYTILTGNAFDTWGQGTTVTVSSASTKGPSVFPLAPSSKSTSGGTAALGCLVKDYFPEPVTVSWNSGALTSGVHTFPAVLQSSGLYSLSSVVTVPSSSLGTQTYICNVNHKPSNTKVDKKVEPKSCDKTHTCPPCPAPELLGGPSVFLFPPKPKDTLMISRTPEVTCVVVDVSHEDPEVKFNWYVDGVEVHNAKTKPREEQYNSTYRVVSVLTVLHQDWLNGKEYKCKVSNKALPAPIEKTISKAKGQPREPQVYTLPPSREEMTKNQVSLTCLVKGFYPSDIAVEWESNGQPENNYKTTPPVLDSDGSFFLYSKLTVDKSRWQQGNVFSCSVMHEALHNHYTQKSLSLSPGGGGGSGGGGSGGGGSQVQLVQSGGGLVQPGGSLRLSCAASGFTFDDYAMHWVRQAPGKGLEWVAGISWDSGSTGYADSVKGRFTISRDNAKNSLYLQMNSLRAEDTALYYCARDLGAYQWVEGFDYWGQGTLVTVSSASTGGGGSGGGGSGGGGSGGGGSSYELTQDPAVSVALGQTVRITCQGDSLRSYYASWYQQKPGQAPVLVIYGKNNRPSGIPDRFSGSTSGNSASLTITGAQAEDEADYYCNSRDSPGNQWVFGGGTKVTVLG

SEQ ID NO: 379 - protein, 720 aa, Artificial Sequence
  Description of Artificial Sequence: Synthetic polypeptide
EVQLLQSGGGLVQPGGSLRLSCAASGFFFSKYPMHWVRQAPGKGLEWVSSISSDGGATVYADSVKGRFTISRDNSKNTLYLQMNSLRAEDTAVYYCAKDFYTILTGNAFDTWGQGTTVTVSSASTKGPSVFPLAPSSKSTSGGTAALGCLVKDYFPEPVTVSWNSGALTSGVHTFPAVLQSSGLYSLSSVVTVPSSSLGTQTYICNVNHKPSNTKVDKKVEPKSCDKTHTCPPCPAPELLGGPSVFLFPPKPKDTLMISRTPEVTCVVVDVSHEDPEVKFNWYVDGVEVHNAKTKPREEQYNSTYRVVSVLTVLHQDWLNGKEYKCKVSNKALPAPIEKTISKAKGQPREPQVYTLPPSREEMTKNQVSLTCLVKGFYPSDIAVEWESNGQPENNYKTTPPVLDSDGSFFLYSKLTVDKSRWQQGNVFSCSVMHEALHNHYTQKSLSLSPGGGGGSGGGGSGGGGSQVQLVQSGGGLVQPGGSLRLSCAASGFTFDDYAMHWVRQAPGKGLEWVAGISWNSGSIGYADSVKGRFTISRDNAKNSLYLQMNSLRPEDTAVYYCARDLGYNQWVEGFDYWGQGTLVTVSSASTGGGGSGGGGSGGGGSGGGGSSYELTQDPAVSVALGQTVRITCQGDSLRSYYASWYQQKPGQAPVLVIYGKNNRPSGIPDRFSGSTSGNSASLTITGAQAEDEADYYCNSRDSSGNHWVFGGGTKVTVLG

SEQ ID NO: 380 - protein, 214 aa, Artificial Sequence
  Description of Artificial Sequence: Synthetic polypeptide
DIQMTQSPSSLSASTGDRVTITCRASQGISSYLAWYQQKPGKAPKLLIYARSTRQSGVPSRFSGSGSGTDFTLTISSLQPEDFATYYCQQYWRWPLTFGGGTKVEIKRTVAAPSVFIFPPSDEQLKSGTASVVCLLNNFYPREAKVQWKVDNALQSGNSQESVTEQDSKDSTYSLSSTLTLSKADYEKHKVYACEVTHQGLSSPVTKSFNRGEC

SEQ ID NO: 381 - protein, 214 aa, Artificial Sequence
  Description of Artificial Sequence: Synthetic polypeptide
DIQMTQSPSSLSASTGDRVTITCRASQGISSYLAWYQQKPGKAPKLLIYAKSTLQSGVPSRFSGSGSGTDFTLTISSLQPEDFATYYCQQYWTFPLTFGGGTKVEIKRTVAAPSVFIFPPSDEQLKSGTASVVCLLNNFYPREAKVQWKVDNALQSGNSQESVTEQDSKDSTYSLSSTLTLSKADYEKHKVYACEVTHQGLSSPVTKSFNRGEC

SEQ ID NO: 382 - protein, 254 aa, Artificial Sequence
  Description of Artificial Sequence: Synthetic polypeptide
EVQLLQSGGGLVQPGGSLRLSCAASGFLFSSYPMHWVRQAPGKGLEWVGSISPSGGATPYADSVKGRFTISRDNSKNTLYLQMNSLRPEDTAVYYCAKDFYNILTGNAFDKWGQGTSVTVSSASTGGGGSGGGGSGGGGSGGGGSDIQLTQSPSSLSASLGDRVTITCRASQGISSYLAWYQQKPGKAPKLLIYAGSTPQSGVPSRFSGSGSGTEFTLTISSLQPEDSGTYYCQQYWTWPLTFGGGTKVEIKRT

SEQ ID NO: 383 - protein, 254 aa, Artificial Sequence
  Description of Artificial Sequence: Synthetic polypeptide
EVQLVESGGGLVQPGRSLRLSCAASGFTFDDYAMHWVRQAPGKGLEWVSGISWNSGSTGYADSVKGRFTISRDNAKNSLYLQMNSLRAEDTALYYCARDLGYNQWLEGFDYWGQGTLVTVSSASTGGGGSGGGGSGGGGSGGGGSSSELTQDPAVSVALGQTVRITCQGDSLRSYYASWYQQKPGQAPVLVIYGKNNRPSGIPDRFSGSSSGNTASLTITGAQAEDEADYYCMSRDHPGNQWVFGGGTKVTVLG

SEQ ID NO: 384 - protein, 122 aa, Artificial Sequence; identical to SEQ ID NO: 10
  Description of Artificial Sequence: Synthetic polypeptide

SEQ ID NO: 385 - protein, 122 aa, Artificial Sequence
  Description of Artificial Sequence: Synthetic polypeptide
EVQLLQSGGGLVQPGGSLRLSCAASGFFFSKYPMHWVRQAPGKGLEWVSSISSDGGATVYADSVKGRFTISRDNSKNTLYLQMNSLRAEDTAVYYCAKDFYTILTGNAFDTWGQGTTVTVSS

SEQ ID NO: 386 - protein, 107 aa, Artificial Sequence
  Description of Artificial Sequence: Synthetic polypeptide
DIQMTQSPSSLSASTGDRVTITCRASQGISSYLAWYQQKPGKAPKLLIYAKSTLQSGVPSRFSGSGSGTDFTLTISSLQPEDFATYYCQQYWTFPLTFGGGTKVEIK

SEQ ID NO: 387 - protein, 107 aa, Artificial Sequence
  Description of Artificial Sequence: Synthetic polypeptide
DIQMTQSPSSLSASTGDRVTITCRASQGISSYLAWYQQKPGKAPKLLIYARSTRQSGVPSRFSGSGSGTDFTLTISSLQPEDFATYYCQQYWRWPLTFGGGTKVEIK

SEQ ID NO: 388 - protein, 122 aa, Artificial Sequence; identical to SEQ ID NO: 141
  Description of Artificial Sequence: Synthetic polypeptide

SEQ ID NO: 389 - protein, 720 aa, Artificial Sequence
  Description of Artificial Sequence: Synthetic polypeptide
EVQLLQSGGGLVQPGGSLRLSCAASGFMFSRYPMHWVRQAPGKGLEWVSSISGSGGATPYADSVKGRFTISRDNSKNTLYLQMNSLRAEDTAVYYCAKDFYQILTGNAFDYWGQGTTVTVSSASTKGPSVFPLAPSSKSTSGGTAALGCLVKDYFPEPVTVSWNSGALTSGVHTFPAVLQSSGLYSLSSVVTVPSSSLGTQTYICNVNHKPSNTKVDKKVEPKSCDKTHTCPPCPAPELLGGPSVFLFPPKPKDTLMISRTPEVTCVVVDVSHEDPEVKFNWYVDGVEVHNAKTKPREEQYNSTYRVVSVLTVLHQDWLNGKEYKCKVSNKALPAPIEKTISKAKGQPREPQVYTLPPSREEMTKNQVSLTCLVKGFYPSDIAVEWESNGQPENNYKTTPPVLDSDGSFFLYSKLTVDKSRWQQGNVFSCSVMHEALHNHYTQKSLSLSPGGGGGSGGGGSGGGGSEVQLVESGGGLVQPGRSLRLSCAASGFTFDDYAMHWVRQAPGKGLEWVSGISWNSGSTGYADSVKGRFTISRDNAKNSLYLQMNSLRAEDTALYYCARDLGYNQWLEGFDYWGQGTLVTVSSASTGGGGSGGGGSGGGGSGGGGSSSELTQDPAVSVALGQTVRITCQGDSLRSYYASWYQQKPGQAPVLVIYGKNNRPSGIPDRFSGSSSGNTASLTITGAQAEDEADYYCMSRDHPGNQWVFGGGTKVTVLG

SEQ ID NO: 390 - protein, 720 aa, Artificial Sequence
  Description of Artificial Sequence: Synthetic polypeptide
EVQLLQSGGGLVQPGGSLRLSCAASGFFFSKYPMHWVRQAPGKGLEWVSSISSDGGATVYADSVKGRFTISRDNSKNTLYLQMNSLRAEDTAVYYCAKDFYTILTGNAFDTWGQGTTVTVSSASTKGPSVFPLAPSSKSTSGGTAALGCLVKDYFPEPVTVSWNSGALTSGVHTFPAVLQSSGLYSLSSVVTVPSSSLGTQTYICNVNHKPSNTKVDKKVEPKSCDKTHTCPPCPAPELLGGPSVFLFPPKPKDTLMISRTPEVTCVVVDVSHEDPEVKFNWYVDGVEVHNAKTKPREEQYNSTYRVVSVLTVLHQDWLNGKEYKCKVSNKALPAPIEKTISKAKGQPREPQVYTLPPSREEMTKNQVSLTCLVKGFYPSDIAVEWESNGQPENNYKTTPPVLDSDGSFFLYSKLTVDKSRWQQGNVFSCSVMHEALHNHYTQKSLSLSPGGGGGSGGGGSGGGGSEVQLVESGGGLVQPGRSLRLSCAASGFTFDDYAMHWVRQAPGKGLEWVSGISWNSGSTGYADSVKGRFTISRDNAKNSLYLQMNSLRAEDTALYYCARDLGYNQWLEGFDYWGQGTLVTVSSASTGGGGSGGGGSGGGGSGGGGSSSELTQDPAVSVALGQTVRITCQGDSLRSYYASWYQQKPGQAPVLVIYGKNNRPSGIPDRFSGSSSGNTASLTITGAQAEDEADYYCMSRDHPGNQWVFGGGTKVTVLG

SEQ ID NO: 391 - protein, 720 aa, Artificial Sequence
  Description of Artificial Sequence: Synthetic polypeptide
EVQLVESGGGLVQPGRSLRLSCAASGFTFDDYAMHWVRQAPGKGLEWVSGISWDSGSTGYADSVKGRFTISRDNAKNSLYLQMNSLRAEDTALYYCARDLGAYQWVEGFDYWGQGTLVTVSSASTKGPSVFPLAPSSKSTSGGTAALGCLVKDYFPEPVTVSWNSGALTSGVHTFPAVLQSSGLYSLSSVVTVPSSSLGTQTYICNVNHKPSNTKVDKKVEPKSCDKTHTCPPCPAPELLGGPSVFLFPPKPKDTLMISRTPEVTCVVVDVSHEDPEVKFNWYVDGVEVHNAKTKPREEQYNSTYRVVSVLTVLHQDWLNGKEYKCKVSNKALPAPIEKTISKAKGQPREPQVYTLPPSREEMTKNQVSLTCLVKGFYPSDIAVEWESNGQPENNYKTTPPVLDSDGSFFLYSKLTVDKSRWQQGNVFSCSVMHEALHNHYTQKSLSLSPGGGGGSGGGGSGGGGSEVQLLQSGGGLVQPGGSLRLSCAASGFLFSSYPMHWVRQAPGKGLEWVGSISPSGGATPYADSVKGRFTISRDNSKNTLYLQMNSLRPEDTAVYYCAKDFYNILTGNAFDKWGQGTSVTVSSASTGGGGSGGGGSGGGGSGGGGSDIQLTQSPSSLSASLGDRVTITCRASQGISSYLAWYQQKPGKAPKLLIYAGSTPQSGVPSRFSGSGSGTEFTLTISSLQPEDSGTYYCQQYWTWPLTFGGGTKVEIKRT

SEQ ID NO: 392 - protein, 4 aa, Artificial Sequence
  Description of Artificial Sequence: Synthetic peptide
ASTK

SEQ ID NO: 393 - protein, 5 aa, Artificial Sequence
  Description of Artificial Sequence: Synthetic peptide
RTVAA

SEQ ID NO: 394 - protein, 5 aa, Artificial Sequence
  Description of Artificial Sequence: Synthetic peptide
QPKAA

SEQ ID NO: 395 - protein, 100 aa, Artificial Sequence
  Description of Artificial Sequence: Synthetic polypeptide
  misc_feature (1)..(100): This sequence may encompass 1-20 "Gly Gly Gly Gly Ser" repeating units
GGGGSGGGGSGGGGSGGGGSGGGGSGGGGSGGGGSGGGGSGGGGSGGGGSGGGGSGGGGSGGGGSGGGGSGGGGSGGGGSGGGGSGGGGSGGGGSGGGGS

SEQ ID NO: 396 - protein, 15 aa, Artificial Sequence
  Description of Artificial Sequence: Synthetic peptide
GGGGSGGGGSGGGGS

SEQ ID NO: 397 - protein, 20 aa, Artificial Sequence
  Description of Artificial Sequence: Synthetic peptide
GGGGSGGGGSGGGGSGGGGS

SEQ ID NO: 398 - protein, 25 aa, Artificial Sequence
  Description of Artificial Sequence: Synthetic peptide
GGGGSGGGGSGGGGSGGGGSGGGGS

SEQ ID NO: 399 - protein, 5 aa, Artificial Sequence
  Description of Artificial Sequence: Synthetic peptide
GGGGS

SEQ ID NO: 400 - protein, 18 aa, Artificial Sequence
  Description of Artificial Sequence: Synthetic peptide
ASTGGGGSGGGGSGGGGS

SEQ ID NO: 401 - protein, 50 aa, Artificial Sequence
  Description of Artificial Sequence: Synthetic polypeptide
  misc_feature (1)..(50): This sequence may encompass 1-10 "Gly Gly Gly Gly Ser" repeating units
GGGGSGGGGSGGGGSGGGGSGGGGSGGGGSGGGGSGGGGSGGGGSGGGGS

SEQ ID NO: 402 - protein, 23 aa, Artificial Sequence
  Description of Artificial Sequence: Synthetic peptide
ASTGGGGSGGGGSGGGGSGGGGS

SEQ ID NO: 403 - protein, 6 aa, Artificial Sequence
  Description of Artificial Sequence: Synthetic 6xHis tag
HHHHHH

SEQ ID NO: 404 - protein, 324 aa, Artificial Sequence
  Description of Artificial Sequence: Synthetic polypeptide
ASTKGPSVFPLAPCSRSTSESTAALGCLVKDYFPEPVTVSWNSGALTSGVHTFPAVLQSSGLYSLSSVVTVPSSNFGTQTYTCNVDHKPSNTKVDKTVERKCCVECPPCPAPPVAGPSVFLFPPKPKDTLMISRTPEVTCVVVDVSHEDPEVQFNWYVDGVEVHNAKTKPREEQFNSTFRVVSVLTVVHQDWLNGKEYKCKVSNKGLPAPIEKTISKTKGQPREPQVYTLPPSREEMTKNQVSLTCLVKGFYPSDIAVEWESNGQPENNYKTTPPMLDSDGSFFLYSKLTVDKSRWQQGNVFSCSVMHEALHNHYTQKSLSLSP

SEQ ID NO: 405 - protein, 734 aa, Artificial Sequence
  Description of Artificial Sequence: Synthetic polypeptide
MGFGLSWLFLVAILKGVQCEVQLLQSGGGLVQPGGSLRLSCAASGFTFSVYPMHWVRQAPGKGLEWVSSISSSGGATRYADSVKGRFTISRDNSKNTLYLQMNSLRAEDTAVYYCAKDFYDILTGNAFDIWGQGTTVTVSSASTKGPSVFPLAPSSKSTSGGTAALGCLVKDYFPEPVTVSWNSGALTSGVHTFPAVLQSSGLYSLSSVVTVPSSSLGTQTYICNVNHKPSNTKVDKKVEPKSCDKTHTCPPCPAPELLGGPSVFLFPPKPKDTLMISRTPEVTCVVVDVSHEDPEVKFNWYVDGVEVHNAKTKPREEQYNSTYRVVSVLTVLHQDWLNGKEYKCKVSNKALPAPIEKTISKAKGQPREPQVYTLPPSREEMTKNQVSLTCLVKGFYPSDIAVEWESNGQPENNYKTTPPVLDSDGSFFLYSKLTVDKSRWQQGNVFSCSVMHEALHNHYTQKSLSLSPGGGGGSGGGGSGGGGSEVQLVESGGGLVQPGRSLRLSCAASGFTFDDYAMHWVRQAPGKGLEWVSGISWDSGSTGYADSVKGRFTISRDNAKNSLYLQMNSLRAEDTALYYCARDLGAYQWVEGFDYWGQGTLVTVSSASTGGGGSGGGGSGGGGSSSELTQDPAVSVALGQTVRITCQGDSLRSYYASWYQQKPGQAPVLVIYGKNNRPSGIPDRFSGSSSGNTASLTITGAQAEDEADYYCESRDSPGNQWVFGGGTKVTVLG

SEQ ID NO: 406 - protein, 734 aa, Artificial Sequence
  Description of Artificial Sequence: Synthetic polypeptide
MGFGLSWLFLVAILKGVQCEVQLLQSGGGLVQPGGSLRLSCAASGFTFSVYPMHWVRQAPGKGLEWVSSISSSGGATRYADSVKGRFTISRDNSKNTLYLQMNSLRAEDTAVYYCAKDFYDILTGNAFDIWGQGTTVTVSSASTKGPSVFPLAPSSKSTSGGTAALGCLVKDYFPEPVTVSWNSGALTSGVHTFPAVLQSSGLYSLSSVVTVPSSSLGTQTYICNVNHKPSNTKVDKKVEPKSCDKTHTCPPCPAPELLGGPSVFLFPPKPKDTLMISRTPEVTCVVVDVSHEDPEVKFNWYVDGVEVHNAKTKPREEQYNSTYRVVSVLTVLHQDWLNGKEYKCKVSNKALPAPIEKTISKAKGQPREPQVYTLPPSREEMTKNQVSLTCLVKGFYPSDIAVEWESNGQPENNYKTTPPVLDSDGSFFLYSKLTVDKSRWQQGNVFSCSVMHEALHNHYTQKSLSLSPGGGGGSGGGGSGGGGSEVQLVESGGGLVQPGRSLRLSCAASGFTFDDYAMHWVRQAPGKGLEWVSGISWNSGSTGYADSVKGRFTISRDNAKNSLYLQMNSLRAEDTALYYCARDLGFNQWVDGFDYWGQGTLVTVSSASTGGGGSGGGGSGGGGSSSELTQDPAVSVALGQTVRITCQGDSLRSYYASWYQQKPGQAPVLVIYGKNNRPSGIPDRFSGSSSGNTASLTITGAQAEDEADYYCNSRDTPGDQWVFGGGTKVTVLG

SEQ ID NO: 407 - protein, 739 aa, Artificial Sequence
  Description of Artificial Sequence: Synthetic polypeptide
MGFGLSWLFLVAILKGVQCEVQLLQSGGGLVQPGGSLRLSCAASGFFFSKYPMHWVRQAPGKGLEWVSSISSDGGATVYADSVKGRFTISRDNSKNTLYLQMNSLRAEDTAVYYCAKDFYTWLTGNAFDSWGQGTSVTVSSASTKGPSVFPLAPSSKSTSGGTAALGCLVKDYFPEPVTVSWNSGALTSGVHTFPAVLQSSGLYSLSSVVTVPSSSLGTQTYICNVNHKPSNTKVDKKVEPKSCDKTHTCPPCPAPELLGGPSVFLFPPKPKDTLMISRTPEVTCVVVDVSHEDPEVKFNWYVDGVEVHNAKTKPREEQYNSTYRVVSVLTVLHQDWLNGKEYKCKVSNKALPAPIEKTISKAKGQPREPQVYTLPPSREEMTKNQVSLTCLVKGFYPSDIAVEWESNGQPENNYKTTPPVLDSDGSFFLYSKLTVDKSRWQQGNVFSCSVMHEALHNHYTQKSLSLSPGGGGGSGGGGSGGGGSQVQLVQSGGGLVQPGGSLRLSCAASGFTFDDYAMHWVRQAPGKGLEWVAGISWNSGSIGYADSVKGRFTISRDNAKNSLYLQMNSLRPEDTAVYYCARDLGYNQWVEGFDYWGQGTLVTVSSASTGGGGSGGGGSGGGGSGGGGSSYELTQDPAVSVALGQTVRITCQGDSLRSYYASWYQQKPGQAPVLVIYGKNNRPSGIPDRFSGSTSGNSASLTITGAQAEDEADYYCNSRDSSGNHWVFGGGTKVTVLG

SEQ ID NO: 408 - protein, 739 aa, Artificial Sequence
  Description of Artificial Sequence: Synthetic polypeptide
MGFGLSWLFLVAILKGVQCEVQLVESGGGLVQPGRSLRLSCAASGFTFDDYAMHWVRQAPGKGLEWVSGISWDSGSVGYADSVKGRFTISRDNAKNSLYLQMNSLRAEDTALYYCARDLGYNQWWEGFDYWGQGTLVTVSSASTKGPSVFPLAPSSKSTSGGTAALGCLVKDYFPEPVTVSWNSGALTSGVHTFPAVLQSSGLYSLSSVVTVPSSSLGTQTYICNVNHKPSNTKVDKKVEPKSCDKTHTCPPCPAPELLGGPSVFLFPPKPKDTLMISRTPEVTCVVVDVSHEDPEVKFNWYVDGVEVHNAKTKPREEQYNSTYRVVSVLTVLHQDWLNGKEYKCKVSNKALPAPIEKTISKAKGQPREPQVYTLPPSREEMTKNQVSLTCLVKGFYPSDIAVEWESNGQPENNYKTTPPVLDSDGSFFLYSKLTVDKSRWQQGNVFSCSVMHEALHNHYTQKSLSLSPGGGGGSGGGGSGGGGSEVQLLQSGGGLVQPGGSLRLSCAASGFDFSSYPMHWVRQAPGKGLEWVGSISSSGGATPYADSVKGRFTISRDNSKNTLYLQMNSLRPEDTAVYYCAKDFYTILTGNAFDMWGQGTSVTVSSASTGGGGSGGGGSGGGGSGGGGSDIQMTQSPSSLSASLGDRVTITCRASQGISSYLAWYQQKPGKAPKLLIYASSTRQSGVPSRFSGSGSGTDFTLTISSLQPEDSGTYYCQQYWAFPLTFGGGTKVEIKRT

SEQ ID NO: 409 - DNA, 2231 bp, Artificial Sequence
  Description of Artificial Sequence: Synthetic polynucleotide
ccatgggcttcgggttgtcgtggctctttttggtcgcaatcttgaagggtgtccagtgcgaggtccagctcgtcgagtcaggtggaggactggtgcaacccggtcgatcacttcggctgtcgtgtgcggcatcgggattcacgtttgacgattatgccatgcattgggtgcgacaagctccgggcaaagggcttgaatgggtgtccggaatctcgtgggattcggggtcagtgggctatgccgattccgtaaagggtaggttcaccatctcacgcgacaatgcgaagaattcgttgtacctccaaatgaattcgcttagggcagaagatacggccttgtactattgcgcaagggaccttgggtacaaccagtggtgggaaggtttcgattactggggtcagggaaccctggtaacggtgtcgagcgctagcactaagggaccgtccgtgtttcccctcgcgcctagctcgaagagcacatcgggaggaacagcggcgctcggctgtctcgtcaaagactacttccccgagccggtgaccgtgagctggaattccggagcgttgacctcaggggtgcatacattccctgccgtactgcaatcatcagggctctactcattgtcgagcgtagtgactgtaccgtcgtcatcgctcggaacgcagacgtacatctgcaatgtcaatcacaagccctccaatactaaggtagataagaaagtagaaccgaagtcgtgtgataagacccatacatgccctccgtgccccgcaccggaactcttgggtggcccatcagtctttctgttcccgccaaagcccaaagacacactgatgatttcgcgcacgcccgaagtcacttgcgtcgtggtggatgtgtcgcatgaggacccggaggtcaagttcaactggtacgtcgatggtgtagaagtccacaacgccaagaccaagcctcgggaggagcagtataactccacctaccgggtagtgagcgtgcttacagtgctccatcaggactggctgaacggcaaagaatacaaatgcaaagtcagcaacaaagcgctgccagcgcccatcgagaaaacaattagcaaagcgaaagggcagcccagagaacctcaagtgtatacattgccgccgtcgcgggaggaaatgacaaagaatcaggtatccctgacgtgtcttgtgaaaggcttttacccatccgacattgcggtagagtgggagtcgaatgggcaacccgagaacaactataagacgactcccccagtcttggattcagacggatcctttttcttgtactcgaaactcacagtcgacaagtccagatggcagcaggggaacgtgttcagctgcagcgtgatgcacgaggcccttcacaaccactatacgcagaaatcattaagcttatcgcccggaggaggtgggggttccgggggtgggggatccggtggaggagggtccgaggtccaactgctgcagtccggcggagggctcgtgcagcctggcggtagcctgagactttcgtgtgcggccagcgggtttgacttttcatcatatcccatgcactgggtgagacaagctccggggaaaggtcttgaatgggtcggctccatttcgtcatcgggtggtgcgaccccgtacgccgattcggtgaagggacgattcaccatctcgcgggataactcgaagaacactctttatctccagatgaattcgctgaggcccgaagatacggcagtgtattactgtgcgaaagacttctatacgattttgactggcaatgcattcgacatgtggggccagggaacgtcggtaacagtctcaagcgcatcaacaggtggtggagggtcgggaggaggaggaagcggtgggggagggtcagggggaggcggatcggacatccagatgacccagtccccttcctcgctctccgcgtccttgggtgaccgcgtaacgatcacatgcagagcaagccaaggaatttcaagctatcttgcgtggtatcagcagaagccgggtaaagcgcccaagttgttgatctacgccagctccacaaggcagtcgggggtcccctcacgcttttcggggtcgggctcgggaactgacttcaccttgacgatctccagcctccagccagaggattcagggacctactactgccaacagtactgggcgtttcccctgacattcggagggggaacaaaagtagagatcaagcggacgtgataatctaga

SEQ ID NO: 410 - protein, 739 aa, Artificial Sequence
  Description of Artificial Sequence: Synthetic polypeptide
MGFGLSWLFLVAILKGVQCEVQLLQSGGGLVQPGGSLRLSCAASGFMFSRYPMHWVRQAPGKGLEWVGSISGSGGATPYADSVKGRFTISRDNSKNTLYLQMNSLRAEDTAVYYCAKDFYQILTGNAFDYWGQGTTVTVSSASTKGPSVFPLAPSSKSTSGGTAALGCLVKDYFPEPVTVSWNSGALTSGVHTFPAVLQSSGLYSLSSVVTVPSSSLGTQTYICNVNHKPSNTKVDKKVEPKSCDKTHTCPPCPAPELLGGPSVFLFPPKPKDTLMISRTPEVTCVVVDVSHEDPEVKFNWYVDGVEVHNAKTKPREEQYNSTYRVVSVLTVLHQDWLNGKEYKCKVSNKALPAPIEKTISKAKGQPREPQVYTLPPSREEMTKNQVSLTCLVKGFYPSDIAVEWESNGQPENNYKTTPPVLDSDGSFFLYSKLTVDKSRWQQGNVFSCSVMHEALHNHYTQKSLSLSPGGGGGSGGGGSGGGGSQVQLVQSGGGLVQPGGSLRLSCAASGFTFDDYAMHWVRQAPGKGLEWVAGISWDSGSTGYADSVKGRFTISRDNAKNSLYLQMNSLRAEDTALYYCARDLGAYQWVEGFDYWGQGTLVTVSSASTGGGGSGGGGSGGGGSGGGGSSYELTQDPAVSVALGQTVRITCQGDSLRSYYASWYQQKPGQAPVLVIYGKNNRPSGIPDRFSGSTSGNSASLTITGAQAEDEADYYCNSRDSPGNQWVFGGGTKVTVLG

SEQ ID NO: 411 - DNA, 2231 bp, Artificial Sequence
  Description of Artificial Sequence: Synthetic polynucleotide
ccatgggctttgggctgtcgtggctttttcttgtcgcgatcctcaagggagtgcagtgcgaagtccagctgctccaaagcggcggaggactcgtacagccgggagggagcttgaggctcagctgcgctgcgtccggtttcatgttctcaagatatcccatgcactgggtgcggcaggcaccaggaaagggactggagtgggtcggttcgatttcgggctccggtggggcaaccccttatgccgattccgtcaaagggcgctttaccatttcaagggataacagcaagaacactttgtacttgcaaatgaattcgcttcgagcggaggacacagccgtgtactactgtgcgaaagacttttaccagatcttgacaggtaatgccttcgactattgggggcaggggacaacggtaacggtgtcgtccgctagcactaagggaccgtccgtgtttcccctcgcgcctagctcgaagagcacatcgggaggaacagcggcgctcggctgtctcgtcaaagactacttccccgagccggtgaccgtgagctggaattccggagcgttgacctcaggggtgcatacattccctgccgtactgcaatcatcagggctctactcattgtcgagcgtagtgactgtaccgtcgtcatcgctcggaacgcagacgtacatctgcaatgtcaatcacaagccctccaatactaaggtagataagaaagtagaaccgaagtcgtgtgataagacccatacatgccctccgtgccccgcaccggaactcttgggtggcccatcagtctttctgttcccgccaaagcccaaagacacactgatgatttcgcgcacgcccgaagtcacttgcgtcgtggtggatgtgtcgcatgaggacccggaggtcaagttcaactggtacgtcgatggtgtagaagtccacaacgccaagaccaagcctcgggaggagcagtataactccacctaccgggtagtgagcgtgcttacagtgctccatcaggactggctgaacggcaaagaatacaaatgcaaagtcagcaacaaagcgctgccagcgcccatcgagaaaacaattagcaaagcgaaagggcagcccagagaacctcaagtgtatacattgccgccgtcgcgggaggaaatgacaaagaatcaggtatccctgacgtgtcttgtgaaaggcttttacccatccgacattgcggtagagtgggagtcgaatgggcaacccgagaacaactataagacgactcccccagtcttggattcagacggatcctttttcttgtactcgaaactcacagtcgacaagtccagatggcagcaggggaacgtgttcagctgcagcgtgatgcacgaggcccttcacaaccactatacgcagaaatcattaagcttatcgcctggcggtggaggagggtcaggaggcggagggtcgggaggtggcgggtcgcaagtccagttggtccagtcgggaggcggactcgtccagcccggaggttcgcttcgattgtcgtgtgccgcatccggattcacttttgacgactacgcgatgcactgggtgagacaggctccggggaaagggctggagtgggtggcggggatttcgtgggattccgggagcaccggatacgccgactccgtgaaaggacggttcacgatttcaagagataatgccaagaactcgctctatttgcagatgaattcacttagggctgaagatacagcgttgtactactgtgcgcgcgaccttggagcatatcagtgggtggagggcttcgattactggggccaagggactcttgtgacagtctcaagcgcctcgacaggaggaggtggatcaggtggtggaggttcagggggagggggttcgggaggaggaggatccagctatgaactgacacaagatcccgcagtgtcggtagcgctcgggcagactgtacgcatcacctgccagggggactcactgcggagctattacgcgtcgtggtatcagcaaaagccaggacaggcgccagtgctggtcatctacgggaagaacaaccggccctcggggatcccggacaggttctccgggtccaccagcggtaactccgcttcactcacgatcacaggggcccaggccgaggacgaagcggactattactgcaacagccgagatagcccgggtaatcaatgggtatttgggggtggtacgaaagtaacggtgcttggctgataatctaga

SEQ ID NO: 412 - protein, 739 aa, Artificial Sequence
  Description of Artificial Sequence: Synthetic polypeptide
MGFGLSWLFLVAILKGVQCEVQLLQSGGGLVQPGGSLRLSCAASGFMFSRYPMHWVRQAPGKGLEWVGSISGSGGATPYADSVKGRFTISRDNSKNTLYLQMNSLRAEDTAVYYCAKDFYQILTGNAFDYWGQGTTVTVSSASTKGPSVFPLAPSSKSTSGGTAALGCLVKDYFPEPVTVSWNSGALTSGVHTFPAVLQSSGLYSLSSVVTVPSSSLGTQTYICNVNHKPSNTKVDKKVEPKSCDKTHTCPPCPAPELLGGPSVFLFPPKPKDTLMISRTPEVTCVVVDVSHEDPEVKFNWYVDGVEVHNAKTKPREEQYNSTYRVVSVLTVLHQDWLNGKEYKCKVSNKALPAPIEKTISKAKGQPREPQVYTLPPSREEMTKNQVSLTCLVKGFYPSDIAVEWESNGQPENNYKTTPPVLDSDGSFFLYSKLTVDKSRWQQGNVFSCSVMHEALHNHYTQKSLSLSPGGGGGSGGGGSGGGGSQVQLVQSGGGLVQPGGSLRLSCAASGFTFDDYAMHWVRQAPGKGLEWVAGISWNSGSIGYADSVKGRFTISRDNAKNSLYLQMNSLRPEDTAVYYCARDLGYNQWVEGFDYWGQGTLVTVSSASTGGGGSGGGGSGGGGSGGGGSSYELTQDPAVSVALGQTVRITCQGDSLRSYYASWYQQKPGQAPVLVIYGKNNRPSGIPDRFSGSTSGNSASLTITGAQAEDEADYYCNSRDSSGNHWVFGGGTKVTVLG

SEQ ID NO: 413 - DNA, 2231 bp, Artificial Sequence
  Description of Artificial Sequence: Synthetic polynucleotide
ccatgggctttgggctgtcgtggctttttcttgtcgcgatcctcaagggagtgcagtgcgaagtccagctgctccaaagcggcggaggactcgtacagccgggagggagcttgaggctcagctgcgctgcgtccggtttcatgttctcaagatatcccatgcactgggtgcggcaggcaccaggaaagggactggagtgggtcggttcgatttcgggctccggtggggcaaccccttatgccgattccgtcaaagggcgctttaccatttcaagggataacagcaagaacactttgtacttgcaaatgaattcgcttcgagcggaggacacagccgtgtactactgtgcgaaagacttttaccagatcttgacaggtaatgccttcgactattgggggcaggggacaacggtaacggtgtcgtccgctagcactaagggaccgtccgtgtttcccctcgcgcctagctcgaagagcacatcgggaggaacagcggcgctcggctgtctcgtcaaagactacttccccgagccggtgaccgtgagctggaattccggagcgttgacctcaggggtgcatacattccctgccgtactgcaatcatcagggctctactcattgtcgagcgtagtgactgtaccgtcgtcatcgctcggaacgcagacgtacatctgcaatgtcaatcacaagccctccaatactaaggtagataagaaagtagaaccgaagtcgtgtgataagacccatacatgccctccgtgccccgcaccggaactcttgggtggcccatcagtctttctgttcccgccaaagcccaaagacacactgatgatttcgcgcacgcccgaagtcacttgcgtcgtggtggatgtgtcgcatgaggacccggaggtcaagttcaactggtacgtcgatggtgtagaagtccacaacgccaagaccaagcctcgggaggagcagtataactccacctaccgggtagtgagcgtgcttacagtgctccatcaggactggctgaacggcaaagaatacaaatgcaaagtcagcaacaaagcgctgccagcgcccatcgagaaaacaattagcaaagcgaaagggcagcccagagaacctcaagtgtatacattgccgccgtcgcgggaggaaatgacaaagaatcaggtatccctgacgtgtcttgtgaaaggcttttacccatccgacattgcggtagagtgggagtcgaatgggcaacccgagaacaactataagacgactcccccagtcttggattcagacggatcctttttcttgtactcgaaactcacagtcgacaagtccagatggcagcaggggaacgtgttcagctgcagcgtgatgcacgaggcccttcacaaccactatacgcagaaatcattaagcttatcgcccggaggaggcggagggtcaggtgggggtggttcgggcggagggggatcccaagtgcagctggtccagtcgggtgggggcttggtgcagccgggtggatcactgcgcctttcgtgcgccgcaagcgggtttacattcgatgattacgcgatgcattgggtgagacaggcacctggtaaagggcttgaatgggtggcagggatctcatggaattcgggatccattggatacgcagactcagtcaagggacgcttcacgatcagccgggacaatgcgaagaactcactgtatcttcagatgaattcgctcagacccgaggacaccgcagtgtactattgtgcccgcgaccttggctacaatcaatgggtagagggtttcgattattggggacagggaacgcttgtcactgtctccagcgcgtccacgggagggggaggtagcggtgggggagggtccgggggagggggttccggcggaggagggtcatcgtatgaactcacacaagatcccgcggtatccgtggcgctcggtcagacagtaaggattacatgtcagggagacagcttgcgatcctactatgcgagctggtatcagcagaaaccgggacaggcgccagtgttggtcatctacgggaaaaacaaccggccttcgggaatcccggaccggttttcgggtagcacttcggggaattcggcgtcactgactattacgggagcgcaagctgaagatgaggccgactactactgcaacagccgagattcctcggggaaccactgggtgtttggaggcggtacgaaggtcaccgtcttggggtgataatctaga

SEQ ID NO: 414 - protein, 235 aa, Artificial Sequence
  Description of Artificial Sequence: Synthetic polypeptide
MAWRLWWLLLLLLLLWPMVWASSELTQDPAVSVALGQTVRITCQGDSLRSYYASWYQQKPGQAPVLVIYGKNNRPSGIPDRFSGSSSGNTASLTITGAQAEDEADYYCNSRDTPGNKWVFGGGTKVTVIGQPKAAPSVTLFPPSSEELQANKATLVCLVSDFYPGAVTVAWKADGSPVKVGVETTKPSKQSNNKYAASSYLSLTPEQWKSHRSYSCRVTHEGSTVEKTVAPAECS

SEQ ID NO: 415 - DNA, 719 bp, Artificial Sequence
  Description of Artificial Sequence: Synthetic polynucleotide
ccatggcctggcggttgtggtggcttttgctcctccttctgttgctttggcctatggtgtgggcctcaagcgaattgacccaagaccccgcagtctccgtggcgcttgggcaaactgtgagaatcacgtgtcaaggagacagccttagaagctactatgcctcgtggtatcagcagaagccaggtcaggccccagtcctcgtgatctacgggaagaacaaccgcccctcgggtattcccgaccgcttttcgggatcgtcctccggaaatacggcttccctgacgatcaccggagcccaagcggaagatgaggcggattactattgcaactcacgggacacgccgggtaacaagtgggtattcgggggaggcactaaagtaacagtgattggccagcctaaagcggcaccgtcggtgactctctttcccccgtcatcggaagagcttcaggcgaataaggcgacactggtatgcttggtcagcgatttctacccgggagccgtaacggtcgcgtggaaagcggacgggtcgcccgtgaaagtcggggtcgagacaacgaaaccctcaaaacagtcgaataacaagtacgcggcatcatcatatctctcattgacccctgaacagtggaagagccataggtcgtactcgtgtcgagtcacacacgagggatccaccgtagaaaagacagtggctcctgccgagtgttcctgataatctaga

SEQ ID NO: 416 - protein, 234 aa, Artificial Sequence
  Description of Artificial Sequence: Synthetic polypeptide
MGTPAQLLFLLLLWLPDTTGDIQMTQSPSSLSASLGDRVTITCRASQGISSYLAWYQQKPGKAPKLLIYAKSTLQSGVPSRFSGSGSGTDFTLTISSLQPEDSATYYCQQYWTFPLTFGGGTKVEIKRTVAAPSVFIFPPSDEQLKSGTASVVCLLNNFYPREAKVQWKVDNALQSGNSQESVTEQDSKDSTYSLSSTLTLSKADYEKHKVYACEVTHQGLSSPVTKSFNRGEC

SEQ ID NO: 417 - DNA, 716 bp, Artificial Sequence
  Description of Artificial Sequence: Synthetic polynucleotide
ccatgggcactcccgcgcagctccttttcctccttttgctttggttgccggacacgacaggcgatattcaaatgacacagtcaccctcgtcactcagcgccagccttggggaccgcgtaacgatcacgtgtagagcgtcgcaggggatttcctcgtatctggcgtggtatcagcaaaagcctggtaaagctccgaaactcctgatctacgccaagtcgaccttgcagtccggagtcccctcaaggttcagcgggtcgggatccggtacagatttcaccctgaccatctcaagcctccagccagaggactccgcaacgtactattgccagcagtactggacgtttcctttgacttttggaggcggaacaaaggtggaaatcaaacgtacggtcgcagctccttcggtattcatctttccgccctccgatgagcagctcaaatccggtacagcctcggtggtgtgcctgctgaataacttctatccccgggaggcgaaagtgcagtggaaagtggacaacgcgctccaatcaggaaattcccaagaatcagtcacagaacaggattcgaaagactcgacctactcactttcgtcgaccttgacgctctccaaggccgactacgagaaacacaaggtgtatgcgtgtgaagtcacacatcaagggctttcatccccagtcacgaagtcattcaaccgcggtgaatgttgataatctaga

SEQ ID NO: 418 - protein, 329 aa, Artificial Sequence
  Description of Artificial Sequence: Synthetic polypeptide
ASTKGPSVFPLAPSSKSTSGGTAALGCLVKDYFPEPVTVSWNSGALTSGVHTFPAVLQSSGLYSLSSVVTVPSSSLGTQTYICNVNHKPSNTKVDKKVEPKSCDKTHTCPPCPAPELLGGPSVFLFPPKPKDTLMISRTPEVTCVVVDVSHEDPEVKFNWYVDGVEVHNAKTKPREEQYNSTYRVVSVLTVLHQDWLNGKEYKCKVSNKALPAPIEKTISKAKGQPREPQVYTLPPSREEMTKNQVSLTCLVKGFYPSDIAVEWESNGQPENNYKTTPPVLDSDGSFFLYSKLTVDKSRWQQGNVFSCSVMHEALHNHYTQKSLSLSPG

SEQ ID NO: 419 - DNA, 2166 bp, Artificial Sequence
  Description of Artificial Sequence: Synthetic polynucleotide
gaggtgcagcttctccaatcgggaggcgggctggtccagccgggtggttcacttcggctctcatgtgcagcgtcggggtttatgttcagcaggtatcctatgcactgggtacgacaagccccagggaagggtttggagtgggtgagctcgatctccggatcaggtggagccacaccctatgcggacagcgtcaaggggcgcttcaccatctccagagacaatagcaaaaacacgctgtatcttcagatgaactcgctccgggcagaagatactgcggtgtactactgcgctaaggatttctaccagattttgaccggcaatgcgtttgactactggggacagggaacaacggtcacggtgtcgtcggctagcactaagggaccgtccgtgtttcccctcgcgcctagctcgaagagcacatcgggaggaacagcggcgctcggctgtctcgtcaaagactacttccccgagccggtgaccgtgagctggaattccggagcgttgacctcaggggtgcatacattccctgccgtactgcaatcatcagggctctactcattgtcgagcgtagtgactgtaccgtcgtcatcgctcggaacgcagacgtacatctgcaatgtcaatcacaagccctccaatactaaggtagataagaaagtagaaccgaagtcgtgtgataagacccatacatgccctccgtgccccgcaccggaactcttgggtggcccatcagtctttctgttcccgccaaagcccaaagacacactgatgatttcgcgcacgcccgaagtcacttgcgtcgtggtggatgtgtcgcatgaggacccggaggtcaagttcaactggtacgtcgatggtgtagaagtccacaacgccaagaccaagcctcgggaggagcagtataactccacctaccgggtagtgagcgtgcttacagtgctccatcaggactggctgaacggcaaagaatacaaatgcaaagtcagcaacaaagcgctgccagcgcccatcgagaaaacaattagcaaagcgaaagggcagcccagagaacctcaagtgtatacattgccgccgtcgcgggaggaaatgacaaagaatcaggtatccctgacgtgtcttgtgaaaggcttttacccatccgacattgcggtagagtgggagtcgaatgggcaacccgagaacaactataagacgactcccccagtcttggattcagacggatcctttttcttgtactcgaaactcacagtcgacaagtccagatggcagcaggggaacgtgttcagctgcagcgtgatgcacgaggcccttcacaaccactatacgcagaaatcattaagcttatcgcctggcggtggaggagggtcaggaggcggagggtcgggaggtggcgggtcgcaagtccagttggtccagtcgggaggcggactcgtccagcccggaggttcgcttcgattgtcgtgtgccgcatccggattcacttttgacgactacgcgatgcactgggtgagacaggctccggggaaagggctggagtgggtggcggggatttcgtgggattccgggagcaccggatacgccgactccgtgaaaggacggttcacgatttcaagagataatgccaagaactcgctctatttgcagatgaattcacttagggctgaagatacagcgttgtactactgtgcgcgcgaccttggagcatatcagtgggtggagggcttcgattactggggccaagggactcttgtgacagtctcaagcgcctcgacaggaggaggtggatcaggtggtggaggttcagggggagggggttcgggaggaggaggatccagctatgaactgacacaagatcccgcagtgtcggtagcgctcgggcagactgtacgcatcacctgccagggggactcactgcggagctattacgcgtcgtggtatcagcaaaagccaggacaggcgccagtgctggtcatctacgggaagaacaaccggccctcggggatcccggacaggttctccgggtccaccagcggtaactccgcttcactcacgatcacaggggcccaggccgaggacgaagcggactattactgcaacagccgagatagcccgggtaatcaatgggtatttgggggtggtacgaaagtaacggtgcttggctgataa

SEQ ID NO: 420 - DNA, 2166 bp, Artificial Sequence
  Description of Artificial Sequence: Synthetic polynucleotide
gaggtgcagcttctccaatcgggaggcgggctggtccagccgggtggttcacttcggctctcatgtgcagcgtcggggtttatgttcagcaggtatcctatgcactgggtacgacaagccccagggaagggtttggagtgggtgagctcgatctccggatcaggtggagccacaccctatgcggacagcgtcaaggggcgcttcaccatctccagagacaatagcaaaaacacgctgtatcttcagatgaactcgctccgggcagaagatactgcggtgtactactgcgctaaggatttctaccagattttgaccggcaatgcgtttgactactggggacagggaacaacggtcacggtgtcgtcggctagcactaagggaccgtccgtgtttcccctcgcgcctagctcgaagagcacatcgggaggaacagcggcgctcggctgtctcgtcaaagactacttccccgagccggtgaccgtgagctggaattccggagcgttgacctcaggggtgcatacattccctgccgtactgcaatcatcagggctctactcattgtcgagcgtagtgactgtaccgtcgtcatcgctcggaacgcagacgtacatctgcaatgtcaatcacaagccctccaatactaaggtagataagaaagtagaaccgaagtcgtgtgataagacccatacatgccctccgtgccccgcaccggaactcttgggtggcccatcagtctttctgttcccgccaaagcccaaagacacactgatgatttcgcgcacgcccgaagtcacttgcgtcgtggtggatgtgtcgcatgaggacccggaggtcaagttcaactggtacgtcgatggtgtagaagtccacaacgccaagaccaagcctcgggaggagcagtataactccacctaccgggtagtgagcgtgcttacagtgctccatcaggactggctgaacggcaaagaatacaaatgcaaagtcagcaacaaagcgctgccagcgcccatcgagaaaacaattagcaaagcgaaagggcagcccagagaacctcaagtgtatacattgccgccgtcgcgggaggaaatgacaaagaatcaggtatccctgacgtgtcttgtgaaaggcttttacccatccgacattgcggtagagtgggagtcgaatgggcaacccgagaacaactataagacgactcccccagtcttggattcagacggatcctttttcttgtactcgaaactcacagtcgacaagtccagatggcagcaggggaacgtgttcagctgcagcgtgatgcacgaggcccttcacaaccactatacgcagaaatcattaagcttatcgcccggaggaggcggagggtcaggtgggggtggttcgggcggagggggatcccaagtgcagctggtccagtcgggtgggggcttggtgcagccgggtggatcactgcgcctttcgtgcgccgcaagcgggtttacattcgatgattacgcgatgcattgggtgagacaggcacctggtaaagggcttgaatgggtggcagggatctcatggaattcgggatccattggatacgcagactcagtcaagggacgcttcacgatcagccgggacaatgcgaagaactcactgtatcttcagatgaattcgctcagacccgaggacaccgcagtgtactattgtgcccgcgaccttggctacaatcaatgggtagagggtttcgattattggggacagggaacgcttgtcactgtctccagcgcgtccacgggagggggaggtagcggtgggggagggtccgggggagggggttccggcggaggagggtcatcgtatgaactcacacaagatcccgcggtatccgtggcgctcggtcagacagtaaggattacatgtcagggagacagcttgcgatcctactatgcgagctggtatcagcagaaaccgggacaggcgccagtgttggtcatctacgggaaaaacaaccggccttcgggaatcccggaccggttttcgggtagcacttcggggaattcggcgtcactgactattacgggagcgcaagctgaagatgaggccgactactactgcaacagccgagattcctcggggaaccactgggtgtttggaggcggtacgaaggtcaccgtcttggggtgataa

SEQ ID NO: 421 - DNA, 2166 bp, Artificial Sequence
  Description of Artificial Sequence: Synthetic polynucleotide
gaggtgcagcttctccaatcgggaggcgggctggtccagccgggtggttcacttcggctctcatgtgcagcgtcggggtttatgttcagcaggtatcctatgcactgggtacgacaagccccagggaagggtttggagtgggtgagctcgatctccggatcaggtggagccacaccctatgcggacagcgtcaaggggcgcttcaccatctccagagacaatagcaaaaacacgctgtatcttcagatgaactcgctccgggcagaagatactgcggtgtactactgcgctaaggatttctaccagattttgaccggcaatgcgtttgactactggggacagggaacaacggtcacggtgtcgtcggctagcactaagggaccgtccgtgtttcccctcgcgcctagctcgaagagcacatcgggaggaacagcggcgctcggctgtctcgtcaaagactacttccccgagccggtgaccgtgagctggaattccggagcgttgacctcaggggtgcatacattccctgccgtactgcaatcatcagggctctactcattgtcgagcgtagtgactgtaccgtcgtcatcgctcggaacgcagacgtacatctgcaatgtcaatcacaagccctccaatactaaggtagataagaaagtagaaccgaagtcgtgtgataagacccatacatgccctccgtgccccgcaccggaactcttgggtggcccatcagtctttctgttcccgccaaagcccaaagacacactgatgatttcgcgcacgcccgaagtcacttgcgtcgtggtggatgtgtcgcatgaggacccggaggtcaagttcaactggtacgtcgatggtgtagaagtccacaacgccaagaccaagcctcgggaggagcagtataactccacctaccgggtagtgagcgtgcttacagtgctccatcaggactggctgaacggcaaagaatacaaatgcaaagtcagcaacaaagcgctgccagcgcccatcgagaaaacaattagcaaagcgaaagggcagcccagagaacctcaagtgtatacattgccgccgtcgcgggaggaaatgacaaagaatcaggtatccctgacgtgtcttgtgaaaggcttttacccatccgacattgcggtagagtgggagtcgaatgggcaacccgagaacaactataagacgactcccccagtcttggattcagacggatcctttttcttgtactcgaaactcacagtcgacaagtccagatggcagcaggggaacgtgttcagctgcagcgtgatgcacgaggcccttcacaaccactatacgcagaaatcattaagcttatcgcccggaggagggggagggagcggcggtggagggtccggaggtggaggaagcgaggtgcagctcgtggagtcgggagggggactcgtccagcccgggagaagccttaggctctcgtgtgccgcctcggggtttacgttcgatgactatgccatgcattgggtcagacaggcaccaggaaaaggtcttgaatgggtgtccggaatctcatggaactccgggtcaacaggatacgctgattccgtaaaaggccgcttcaccatctccagagacaatgcgaagaactcattgtacctccagatgaactcactcagggcggaggacaccgcactgtactactgcgccagggacctcgggtacaaccagtggttggaggggtttgattattggggtcaggggaccttggtcacagtaagctccgccagcacagggggtggcggatccggaggcggtggcagcggaggaggtggatccgggggtggtgggtcgtcaagcgagctgactcaagatccggcggtgtcagtcgcgcttggacagacagtgcgcattacgtgccagggcgactcgcttcggagctactatgcgtcatggtatcaacagaagccgggtcaagcgcctgtgttggtcatctacgggaagaacaatcggccctcggggatccctgaccgattcagcggttcatcatccggtaatacggcatcgcttactattacgggagcacaggcggaagatgaagccgattactattgtatgtcgcgggaccacccggggaatcagtgggtgtttgggggaggaactaaagtaacggtattggggtgataa

SEQ ID NO: 422 - DNA, 2166 bp, Artificial Sequence
  Description of Artificial Sequence: Synthetic polynucleotide
gaggtacagctgcttcagtccgggggaggactcgtccagccgggaggatcgctccgcctttcatgcgctgcctccggcttcttcttctcgaaatatcctatgcactgggtgcgacaggctcccgggaagggcttggaatgggtcagcagcatcagctcggacggaggggccacggtgtacgcggattcggtcaagggtaggtttacgatctcgcgggataactcaaagaataccctgtatctccaaatgaactccttgagagcagaggacacagcggtatactattgtgcgaaagacttttacacaatcctgacaggtaatgcgtttgatacgtggggtcaggggactaccgtaactgtgtcatcggctagcactaagggaccgtccgtgtttcccctcgcgcctagctcgaagagcacatcgggaggaacagcggcgctcggctgtctcgtcaaagactacttccccgagccggtgaccgtgagctggaattccggagcgttgacctcaggggtgcatacattccctgccgtactgcaatcatcagggctctactcattgtcgagcgtagtgactgtaccgtcgtcatcgctcggaacgcagacgtacatctgcaatgtcaatcacaagccctccaatactaaggtagataagaaagtagaaccgaagtcgtgtgataagacccatacatgccctccgtgccccgcaccggaactcttgggtggcccatcagtctttctgttcccgccaaagcccaaagacacactgatgatttcgcgcacgcccgaagtcacttgcgtcgtggtggatgtgtcgcatgaggacccggaggtcaagttcaactggtacgtcgatggtgtagaagtccacaacgccaagaccaagcctcgggaggagcagtataactccacctaccgggtagtgagcgtgcttacagtgctccatcaggactggctgaacggcaaagaatacaaatgcaaagtcagcaacaaagcgctgccagcgcccatcgagaaaacaattagcaaagcgaaagggcagcccagagaacctcaagtgtatacattgccgccgtcgcgggaggaaatgacaaagaatcaggtatccctgacgtgtcttgtgaaaggcttttacccatccgacattgcggtagagtgggagtcgaatgggcaacccgagaacaactataagacgactcccccagtcttggattcagacggatcctttttcttgtactcgaaactcacagtcgacaagtccagatggcagcaggggaacgtgttcagctgcagcgtgatgcacgaggcccttcacaaccactatacgcagaaatcattaagcttatcgcctggcggtggaggagggtcaggaggcggagggtcgggaggtggcgggtcgcaagtccagttggtccagtcgggaggcggactcgtccagcccggaggttcgcttcgattgtcgtgtgccgcatccggattcacttttgacgactacgcgatgcactgggtgagacaggctccggggaaagggctggagtgggtggcggggatttcgtgggattccgggagcaccggatacgccgactccgtgaaaggacggttcacgatttcaagagataatgccaagaactcgctctatttgcagatgaattcacttagggctgaagatacagcgttgtactactgtgcgcgcgaccttggagcatatcagtgggtggagggcttcgattactggggccaagggactcttgtgacagtctcaagcgcctcgacaggaggaggtggatcaggtggtggaggttcagggggagggggttcgggaggaggaggatccagctatgaactgacacaagatcccgcagtgtcggtagcgctcgggcagactgtacgcatcacctgccagggggactcactgcggagctattacgcgtcgtggtatcagcaaaagccaggacaggcgccagtgctggtcatctacgggaagaacaaccggccctcggggatcccggacaggttctccgggtccaccagcggtaactccgcttcactcacgatcacaggggcccaggccgaggacgaagcggactattactgcaacagccgagatagcccgggtaatcaatgggtatttgggggtggtacgaaagtaacggtgcttggctgataa

SEQ ID NO: 423 - DNA, 2166 bp, Artificial Sequence
  Description of Artificial Sequence: Synthetic polynucleotide
gaggtacagctgcttcagtccgggggaggactcgtccagccgggaggatcgctccgcctttcatgcgctgcctccggcttcttcttctcgaaatatcctatgcactgggtgcgacaggctcccgggaagggcttggaatgggtcagcagcatcagctcggacggaggggccacggtgtacgcggattcggtcaagggtaggtttacgatctcgcgggataactcaaagaataccctgtatctccaaatgaactccttgagagcagaggacacagcggtatactattgtgcgaaagacttttacacaatcctgacaggtaatgcgtttgatacgtggggtcaggggactaccgtaactgtgtcatcggctagcactaagggaccgtccgtgtttcccctcgcgcctagctcgaagagcacatcgggaggaacagcggcgctcggctgtctcgtcaaagactacttccccgagccggtgaccgtgagctggaattccggagcgttgacctcaggggtgcatacattccctgccgtactgcaatcatcagggctctactcattgtcgagcgtagtgactgtaccgtcgtcatcgctcggaacgcagacgtacatctgcaatgtcaatcacaagccctccaatactaaggtagataagaaagtagaaccgaagtcgtgtgataagacccatacatgccctccgtgccccgcaccggaactcttgggtggcccatcagtctttctgttcccgccaaagcccaaagacacactgatgatttcgcgcacgcccgaagtcacttgcgtcgtggtggatgtgtcgcatgaggacccggaggtcaagttcaactggtacgtcgatggtgtagaagtccacaacgccaagaccaagcctcgggaggagcagtataactccacctaccgggtagtgagcgtgcttacagtgctccatcaggactggctgaacggcaaagaatacaaatgcaaagtcagcaacaaagcgctgccagcgcccatcgagaaaacaattagcaaagcgaaagggcagcccagagaacctcaagtgtatacattgccgccgtcgcgggaggaaatgacaaagaatcaggtatccctgacgtgtcttgtgaaaggcttttacccatccgacattgcggtagagtgggagtcgaatgggcaacccgagaacaactataagacgactcccccagtcttggattcagacggatcctttttcttgtactcgaaactcacagtcgacaagtccagatggcagcaggggaacgtgttcagctgcagcgtgatgcacgaggcccttcacaaccactatacgcagaaatcattaagcttatcgcccggaggaggcggagggtcaggtgggggtggttcgggcggagggggatcccaagtgcagctggtccagtcgggtgggggcttggtgcagccgggtggatcactgcgcctttcgtgcgccgcaagcgggtttacattcgatgattacgcgatgcattgggtgagacaggcacctggtaaagggcttgaatgggtggcagggatctcatggaattcgggatccattggatacgcagactcagtcaagggacgcttcacgatcagccgggacaatgcgaagaactcactgtatcttcagatgaattcgctcagacccgaggacaccgcagtgtactattgtgcccgcgaccttggctacaatcaatgggtagagggtttcgattattggggacagggaacgcttgtcactgtctccagcgcgtccacgggagggggaggtagcggtgggggagggtccgggggagggggttccggcggaggagggtcatcgtatgaactcacacaagatcccgcggtatccgtggcgctcggtcagacagtaaggattacatgtcagggagacagcttgcgatcctactatgcgagctggtatcagcagaaaccgggacaggcgccagtgttggtcatctacgggaaaaacaaccggccttcgggaatcccggaccggttttcgggtagcacttcggggaattcggcgtcactgactattacgggagcgcaagctgaagatgaggccgactactactgcaacagccgagattcctcggggaaccactgggtgtttggaggcggtacgaaggtcaccgtcttggggtgataa

SEQ ID NO: 424 - DNA, 2166 bp, Artificial Sequence
  Description of Artificial Sequence: Synthetic polynucleotide
gaggtacagctgcttcagtccgggggaggactcgtccagccgggaggatcgctccgcctttcatgcgctgcctccggcttcttcttctcgaaatatcctatgcactgggtgcgacaggctcccgggaagggcttggaatgggtcagcagcatcagctcggacggaggggccacggtgtacgcggattcggtcaagggtaggtttacgatctcgcgggataactcaaagaataccctgtatctccaaatgaactccttgagagcagaggacacagcggtatactattgtgcgaaagacttttacacaatcctgacaggtaatgcgtttgatacgtggggtcaggggactaccgtaactgtgtcatcggctagcactaagggaccgtccgtgtttcccctcgcgcctagctcgaagagcacatcgggaggaacagcggcgctcggctgtctcgtcaaagactacttccccgagccggtgaccgtgagctggaattccggagcgttgacctcaggggtgcatacattccctgccgtactgcaatcatcagggctctactcattgtcgagcgtagtgactgtaccgtcgtcatcgctcggaacgcagacgtacatctgcaatgtcaatcacaagccctccaatactaaggtagataagaaagtagaaccgaagtcgtgtgataagacccatacatgccctccgtgccccgcaccggaactcttgggtggcccatcagtctttctgttcccgccaaagcccaaagacacactgatgatttcgcgcacgcccgaagtcacttgcgtcgtggtggatgtgtcgcatgaggacccggaggtcaagttcaactggtacgtcgatggtgtagaagtccacaacgccaagaccaagcctcgggaggagcagtataactccacctaccgggtagtgagcgtgcttacagtgctccatcaggactggctgaacggcaaagaatacaaatgcaaagtcagcaacaaagcgctgccagcgcccatcgagaaaacaattagcaaagcgaaagggcagcccagagaacctcaagtgtatacattgccgccgtcgcgggaggaaatgacaaagaatcaggtatccctgacgtgtcttgtgaaaggcttttacccatccgacattgcggtagagtgggagtcgaatgggcaacccgagaacaactataagacgactcccccagtcttggattcagacggatcctttttcttgtactcgaaactcacagtcgacaagtccagatggcagcaggggaacgtgttcagctgcagcgtgatgcacgaggcccttcacaaccactatacgcagaaatcattaagcttatcgcccggaggagggggagggagcggcggtggagggtccggaggtggaggaagcgaggtgcagctcgtggagtcgggagggggactcgtccagcccgggagaagccttaggctctcgtgtgccgcctcggggtttacgttcgatgactatgccatgcattgggtcagacaggcaccaggaaaaggtcttgaatgggtgtccggaatctcatggaactccgggtcaacaggatacgctgattccgtaaaaggccgcttcaccatctccagagacaatgcgaagaactcattgtacctccagatgaactcactcagggcggaggacaccgcactgtactactgcgccagggacctcgggtacaaccagtggttggaggggtttgattattggggtcaggggaccttggtcacagtaagctccgccagcacagggggtggcggatccggaggcggtggcagcggaggaggtggatccgggggtggtgggtcgtcaagcgagctgactcaagatccggcggtgtcagtcgcgcttggacagacagtgcgcattacgtgccagggcgactcgcttcggagctactatgcgtcatggtatcaacagaagccgggtcaagcgcctgtgttggtcatctacgggaagaacaatcggccctcggggatccctgaccgattcagcggttcatcatccggtaatacggcatcgcttactattacgggagcacaggcggaagatgaagccgattactattgtatgtcgcgggaccacccggggaatcagtgggtgtttgggggaggaactaaagtaacggtattggggtgataa

SEQ ID NO: 425 - DNA, 2166 bp, Artificial Sequence
  Description of Artificial Sequence: Synthetic polynucleotide
gaggtccagctcgtcgagtcaggtggaggactggtgcaacccggtcgatcacttcggctgtcgtgtgcggcatcgggattcacgtttgacgattatgccatgcattgggtgcgacaagctccgggcaaagggcttgaatgggtgtccggaatctcgtgggattcggggtcaacgggctatgccgattccgtaaagggtaggttcaccatctcacgcgacaatgcgaagaattcgttgtatcttcagatgaattcgcttagggcagaagatacggccttgtactattgcgcaagggaccttggggcgtaccagtgggtcgagggtttcgattactggggtcagggaaccctggtaacggtgtcgagcgctagcactaagggaccgtccgtgtttcccctcgcgcctagctcgaagagcacatcgggaggaacagcggcgctcggctgtctcgtcaaagactacttccccgagccggtgaccgtgagctggaattccggagcgttgacctcaggggtgcatacattccctgccgtactgcaatcatcagggctctactcattgtcgagcgtagtgactgtaccgtcgtcatcgctcggaacgcagacgtacatctgcaatgtcaatcacaagccctccaatactaaggtagataagaaagtagaaccgaagtcgtgtgataagacccatacatgccctccgtgccccgcaccggaactcttgggtggcccatcagtctttctgttcccgccaaagcccaaagacacactgatgatttcgcgcacgcccgaagtcacttgcgtcgtggtggatgtgtcgcatgaggacccggaggtcaagttcaactggtacgtcgatggtgtagaagtccacaacgccaagaccaagcctcgggaggagcagtataactccacctaccgggtagtgagcgtgcttacagtgctccatcaggactggctgaacggcaaagaatacaaatgcaaagtcagcaacaaagcgctgccagcgcccatcgagaaaacaattagcaaagcgaaagggcagcccagagaacctcaagtgtatacattgccgccgtcgcgggaggaaatgacaaagaatcaggtatccctgacgtgtcttgtgaaaggcttttacccatccgacattgcggtagagtgggagtcgaatgggcaacccgagaacaactataagacgactcccccagtcttggattcagacggatcctttttcttgtactcgaaactcacagtcgacaagtccagatggcagcaggggaacgtgttcagctgcagcgtgatgcacgaggcccttcacaaccactatacgcagaaatcattaagcttaagccccggtggtggtgggggatcaggagggggtggaagcggaggtggcgggagcgaggtccaacttctccagagcgggggagggttggtgcagccgggtgggtccctgcgcctttcgtgcgctgcctccggatttctcttcagctcatatcctatgcactgggtgcgccaggcaccagggaaaggccttgagtgggtcgggtcgatctcgccatccggtggagccacgccctacgcagatagcgtaaaagggcgattcaccatttcgcgggacaattcaaagaacaccctctaccttcagatgaactcgttgaggcccgaggacacagccgtgtactactgcgcgaaggatttctataacattctgacgggtaatgcgtttgataagtggggacagggtacttcggtcacggtgtcgtcagcctcgactggtggaggtgggtccggtgggggtggatcaggtggaggagggtcgggaggagggggatccgacatccagctcacacagtccccctcgtcgttgtcagcgagcctgggtgatcgggtaactatcacatgtagagcatcccagggcatttcatcctatttggcgtggtatcagcagaagcccgggaaagcgcctaagttgctgatctacgcgggatcgacgccgcaatcaggggtgccctcaagattttcggggtcggggagcggaacagaattcacactcacaatctcctcgctccaaccggaggactcagggacctattactgtcagcaatactggacttggccgctgacctttggagggggcacgaaggtcgaaatcaaaaggacgtgataa

SEQ ID NO: 426 - DNA, 648 bp, Artificial Sequence
  Description of Artificial Sequence: Synthetic polynucleotide
gatatccaaatgacgcagtcgccatcgtcgctgagcgcgtcaaccggtgatagagtcacaattacatgcagggcgtcgcagggcatttcatcatacttggcatggtatcaacagaaaccggggaaagcgcccaagttgctcatctacgcccggtccacacgacagagcggtgtacctagccggttctcgggatcggggtccgggacggacttcaccctgaccatctcctcacttcagccggaggactttgctacgtactattgtcagcaatattggcgctggccccttactttcgggggaggaacaaaggtggaaatcaagcgtacggtcgcagctccttcggtattcatctttccgccctccgatgagcagctcaaatccggtacagcctcggtggtgtgcctgctgaataacttctatccccgggaggcgaaagtgcagtggaaagtggacaacgcgctccaatcaggaaattcccaagaatcagtcacagaacaggattcgaaagactcgacctactcactttcgtcgaccttgacgctctccaaggccgactacgagaaacacaaggtgtatgcgtgtgaagtcacacatcaagggctttcatccccagtcacgaagtcattcaaccgcggtgaatgttgataa

SEQ ID NO: 427 - DNA, 648 bp, Artificial Sequence
  Description of Artificial Sequence: Synthetic polynucleotide
gatattcagatgacgcagtcaccgtccagcctttcggcctcgactggggaccgggtaaccattacatgtagagcgtcgcaaggtatctcctcctatttggcctggtatcagcagaaacccggaaaagctcccaagctgctgatctacgcaaagtcaacattgcagagcggagtccctagcaggttctcgggatcaggttcggggactgattttacgcttacaatctcgtcactgcagccggaggactttgcgacgtattactgccagcaatactggacgttcccgctgacatttggcggagggaccaaggtggaaatcaaacgtacggtcgcagctccttcggtattcatctttccgccctccgatgagcagctcaaatccggtacagcctcggtggtgtgcctgctgaataacttctatccccgggaggcgaaagtgcagtggaaagtggacaacgcgctccaatcaggaaattcccaagaatcagtcacagaacaggattcgaaagactcgacctactcactttcgtcgaccttgacgctctccaaggccgactacgagaaacacaaggtgtatgcgtgtgaagtcacacatcaagggctttcatccccagtcacgaagtcattcaaccgcggtgaatgttgataa

SEQ ID NO: 428 - DNA, 768 bp, Artificial Sequence
  Description of Artificial Sequence: Synthetic polynucleotide
gaggtccaacttctccagagcgggggagggttggtgcagccgggtgggtccctgcgcctttcgtgcgctgcctccggatttctcttcagctcatatcctatgcactgggtgcgccaggcaccagggaaaggccttgagtgggtcgggtcgatctcgccatccggtggagccacgccctacgcagatagcgtaaaagggcgattcaccatttcgcgggacaattcaaagaacaccctctaccttcagatgaactcgttgaggcccgaggacacagccgtgtactactgcgcgaaggatttctataacattctgacgggtaatgcgtttgataagtggggacagggtacttcggtcacggtgtcgtcagcctcgactggtggaggtgggtccggtgggggtggatcaggtggaggagggtcgggaggagggggatccgacatccagctcacacagtccccctcgtcgttgtcagcgagcctgggtgatcgggtaactatcacatgtagagcatcccagggcatttcatcctatttggcgtggtatcagcagaagcccgggaaagcgcctaagttgctgatctacgcgggatcgacgccgcaatcaggggtgccctcaagattttcggggtcggggagcggaacagaattcacactcacaatctcctcgctccaaccggaggactcagggacctattactgtcagcaatactggacttggccgctgacctttggagggggcacgaaggtcgaaatcaaaaggacgtgataa

SEQ ID NO: 429 - DNA, 768 bp, Artificial Sequence
  Description of Artificial Sequence: Synthetic polynucleotide
gaggtgcagctcgtggagtcgggagggggactcgtccagcccgggagaagccttaggctctcgtgtgccgcctcggggtttacgttcgatgactatgccatgcattgggtcagacaggcaccaggaaaaggtcttgaatgggtgtccggaatctcatggaactccgggtcaacaggatacgctgattccgtaaaaggccgcttcaccatctccagagacaatgcgaagaactcattgtacctccagatgaactcactcagggcggaggacaccgcactgtactactgcgccagggacctcgggtacaaccagtggttggaggggtttgattattggggtcaggggaccttggtcacagtaagctccgccagcacagggggtggcggatccggaggcggtggcagcggaggaggtggatccgggggtggtgggtcgtcaagcgagctgactcaagatccggcggtgtcagtcgcgcttggacagacagtgcgcattacgtgccagggcgactcgcttcggagctactatgcgtcatggtatcaacagaagccgggtcaagcgcctgtgttggtcatctacgggaagaacaatcggccctcggggatccctgaccgattcagcggttcatcatccggtaatacggcatcgcttactattacgggagcacaggcggaagatgaagccgattactattgtatgtcgcgggaccacccggggaatcagtgggtgtttgggggaggaactaaagtaacggtattggggtgataa

SEQ ID NO: 430 - protein, 7 aa, Artificial Sequence
  Description of Artificial Sequence: Synthetic polypeptide
AKSTLQS

SEQ ID NO: 431 - protein, 9 aa, Artificial Sequence
  Description of Artificial Sequence: Synthetic polypeptide
QQYWTFPLT

SEQ ID NO: 432 - protein, 10 aa, Artificial Sequence
  Description of Artificial Sequence: Synthetic peptide
GFMFSRYPMH

SEQ ID NO: 433 - protein, 16 aa, Artificial Sequence
  Description of Artificial Sequence: Synthetic peptide
ISGSGGATPYADSVKG

SEQ ID NO: 434 - protein, 13 aa, Artificial Sequence
  Description of Artificial Sequence: Synthetic peptide
DFYQILTGNAFDY

SEQ ID NO: 435 - protein, 16 aa, Artificial Sequence
  Description of Artificial Sequence: Synthetic peptide
ISWDSGSTGYADSVKG

SEQ ID NO: 436 - protein, 13 aa, Artificial Sequence
  Description of Artificial Sequence: Synthetic peptide
DLGAYQWVEGFDY

SEQ ID NO: 437 - protein, 11 aa, Artificial Sequence
  Description of Artificial Sequence: Synthetic peptide
NSRDSPGNQWV

SEQ ID NO: 438 - protein, 447 aa, Artificial Sequence
  Synthetic: MPDL3280A_HC_hIgG1; D265A/N297A
EVQLVESGGGLVQPGGSLRLSCAASGFTFSDSWIHWVRQAPGKGLEWVAWISPYGGSTYYADSVKGRFTISADTSKNTAYLQMNSLRAEDTAVYYCARRHWPGGFDYWGQGTLVTVSAASTKGPSVFPLAPSSKSTSGGTAALGCLVKDYFPEPVTVSWNSGALTSGVHTFPAVLQSSGLYSLSSVVTVPSSSLGTQTYICNVNHKPSNTKVDKKVEPKSCDKTHTCPPCPAPELLGGPSVFLFPPKPKDTLMISRTPEVTCVVVAVSHEDPEVKFNWYVDGVEVHNAKTKPREEQYASTYRVVSVLTVLHQDWLNGKEYKCKVSNKALPAPIEKTISKAKGQPREPQVYTLPPSRDELTKNQVSLTCLVKGFYPSDIAVEWESNGQPENNYKTTPPVLDSDGSFFLYSKLTVDKSRWQQGNVFSCSVMHEALHNHYTQKSLSLSPG

SEQ ID NO: 439 - protein, 447 aa, Artificial Sequence
  Synthetic: MPDL3280A_HC_chimerized; mIgG2A; D265A/N297A
EVQLVESGGGLVQPGGSLRLSCAASGFTFSDSWIHWVRQAPGKGLEWVAWISPYGGSTYYADSVKGRFTISADTSKNTAYLQMNSLRAEDTAVYYCARRHWPGGFDYWGQGTLVTVSAAKTTAPSVYPLAPVCGDTTGSSVTLGCLVKGYFPEPVTLTWNSGSLSSGVHTFPAVLQSDLYTLSSSVTVTSSTWPSQSITCNVAHPASSTKVDKKIEPRGPTIKPCPPCKCPAPNLLGGPSVFIFPPKIKDVLMISLSPIVTCVVVAVSEDDPDVQISWFVNNVEVHTAQTQTHREDYASTLRVVSALPIQHQDWMSGKEFKCKVNNKDLPAPIERTISKPKGSVRAPQVYVLPPPEEEMTKKQVTLTCMVTDFMPEDIYVEWTNNGKTELNYKNTEPVLDSDGSYFMYSKLRVEKKNWVERNSYSCSVVHEGLHNHHTTKSFSRTPG

SEQ ID NO: 440 - protein, 214 aa, Artificial Sequence
  Synthetic: MPDL3280A_LC
DIQMTQSPSSLSASVGDRVTITCRASQDVSTAVAWYQQKPGKAPKLLIYSASFLYSGVPSRFSGSGSGTDFTLTISSLQPEDFATYYCQQYLYHPATFGQGTKVEIKRTVAAPSVFIFPPSDEQLKSGTASVVCLLNNFYPREAKVQWKVDNALQSGNSQESVTEQDSKDSTYSLSSTLTLSKADYEKHKVYACEVTHQGLSSPVTKSFNRGEC

SEQ ID NO: 441 - protein, 214 aa, Artificial Sequence
  Synthetic: MPDL3280A_LC_chv2
DIQMTQSPSSLSASVGDRVTITCRASQDVSTAVAWYQQKPGKAPKLLIYSASFLYSGVPSRFSGSGSGTDFTLTISSLQPEDFATYYCQQYLYHPATFGAGTKLELKRADAAPTVSIFPPSSEQLTSGGASVVCFLNNFYPKDINVKWKIDGSERQNGVLNSWTDQDSKDSTYSMSSTLTLTKDEYERHNSYTCEATHKTSTSPIVKSFNRNEC

SEQ ID NO: 442 - protein, 720 aa, Artificial Sequence
  Synthetic: 141mIgG2aHC
EVQLLQSGGGLVQPGGSLRLSCAASGFMFSRYPMHWVRQAPGKGLEWVGSISGSGGATPYADSVKGRFTISRDNSKNTLYLQMNSLRAEDTAVYYCAKDFYQILTGNAFDYWGQGTTVTVSSAKTTAPSVYPLAPVCGDTTGSSVTLGCLVKGYFPEPVTLTWNSGSLSSGVHTFPAVLQSDLYTLSSSVTVTSSTWPSQSITCNVAHPASSTKVDKKIEPRGPTIKPCPPCKCPAPNLLGGPSVFIFPPKIKDVLMISLSPIVTCVVVDVSEDDPDVQISWFVNNVEVHTAQTQTHREDYNSTLRVVSALPIQHQDWMSGKEFKCKVNNKDLPAPIERTISKPKGSVRAPQVYVLPPPEEEMTKKQVTLTCMVTDFMPEDIYVEWTNNGKTELNYKNTEPVLDSDGSYFMYSKLRVEKKNWVERNSYSCSVVHEGLHNHHTTKSFSRTPGGGGGSGGGGSGGGGSQVQLVQSGGGLVQPGGSLRLSCAASGFTFDDYAMHWVRQAPGKGLEWVAGISWDSGSTGYADSVKGRFTISRDNAKNSLYLQMNSLRAEDTALYYCARDLGAYQWVEGFDYWGQGTLVTVSSASTGGGGSGGGGSGGGGSGGGGSSYELTQDPAVSVALGQTVRITCQGDSLRSYYASWYQQKPGQAPVLVIYGKNNRPSGIPDRFSGSTSGNSASLTITGAQAEDEADYYCNSRDSPGNQWVFGGGTKVTVLG

SEQ ID NO: 443 - protein, 214 aa, Artificial Sequence
  Synthetic: 141mLC
DIQMTQSPSSLSASLGDRVTITCRASQGISSYLAWYQQKPGKAPKLLIYAKSTLQSGVPSRFSGSGSGTDFTLTISSLQPEDSATYYCQQYWTFPLTFGGGTKVEIKRADAAPTVSIFPPSSEQLTSGGASVVCFLNNFYPKDINVKWKIDGSERQNGVLNSWTDQDSKDSTYSMSSTLTLTKDEYERHNSYTCEATHKTSTSPIVKSFNRNEC

SEQ ID NO: 444 - protein, 1321 aa, Homo sapiens
  misc_feature: Human ErbB3 protein
SEVGNSQAVCPGTLNGLSVTGDAENQYQTLYKLYERCEVVMGNLEIVLTGHNADLSFLQWIREVTGYVLVAMNEFSTLPLPNLRVVRGTQVYDGKFAIFVMLNYNTNSSHALRQLRLTQLTEILSGGVYIEKNDKLCHMDTIDWRDIVRDRDAEIVVKDNGRSCPPCHEVCKGRCWGPGSEDCQTLTKTICAPQCNGHCFGPNPNQCCHDECAGGCSGPQDTDCFACRHFNDSGACVPRCPQPLVYNKLTFQLEPNPHTKYQYGGVCVASCPHNFVVDQTSCVRACPPDKMEVDKNGLKMCEPCGGLCPKACEGTGSGSRFQTVDSSNIDGFVNCTKILGNLDFLITQGDPWHKIPALDPEKLNVFRTVREITGYLNIQSWPPHMHNFSVFSNLTTIGGRSLYNRGFSLLIMKNLNVTSLGFRSLKEISAGRIYISANRQLCYHHSLNWTKVLRGPTEERLDIKHNRPRRDCVAEGKVCDPLCSSGGCWGPGPGQCLSCRNYSRGGVCVTHCNFLNGEPREFAHEAECFSCHPECQPMEGTATCNGSGSDTCAQCAHFRDGPHCVSSCPHGVLGAKGPIYKYPDVQNECRPCHENCTQGCKGPELQDCLGQTLVLIGKTHLTMALTVIAGLVVIFMMLGGTFLYWRGRRIQNKRAMRRYLERGESIEPLDPSEKANKVLARIFKETELRSLKVLGSGVFGTVHKGVWIPEGESIKIPVCIKVIEDKSGRQSFQAVTDHMLAIGSLDHAHIVRLLGLCPGSSLQLVTQYLPLGSLLDHVRQHRGALGPQLLLNWGVQIAKGMYYLEEHGMVHRNLAARNVLLKSPSQVQVADFGVADLLPPDDKQLLYSEAKTPIKWMALESIHFGKYTHQSDVWSYGVTVWELMTFGAEPYAGLRLAEVPDLLEKGERLAQPQICTIDVYMVMVKCWMIDENIRPTFKELANEFTRMARDPPRYLVIKRESGPGIAPGPEPHGLTNKKLEEVELEPELDLDLDLEAEEDNLATTTLGSALSLPVGTLNRPRGSQSLLSPSSGYMPMNQGNLGESCQESAVSGSSERCPRPVSLHPMPRGCLASESSEGHVTGSEAELQEKVSMCRSRSRSRSPRPRGDSAYHSQRHSLLTPVTPLSPPGLEEEDVNGYVMPDTHLKGTPSSREGTLSSVGLSSVLGTEEEDEDEEYEYMNRRRRHSPPHPPRPSSLEELGYEYMDVGSDLSASLGSTQSCPLHPVPIMPTAGTTPDEDYEYMNRQRDGGGPGGDYAAMGACPASEQGYEEMRAFQGPGHQAPHVHYARLKTLRSLEATDSAFDNPDYWHSRLFPKANAQRT

What is claimed is:

1. The use of a therapeutically effective amount of istiratumab in combination with an immunomodulatory agent to treat cancer in a human patient, where the immunomodulatory agent is selected from the group consisting of: (a) an agonistic anti-receptor antibody that immunospecifically binds human OX40, CD40, GITR, CD27, ICOS, or 4-1BB; (b) an antagonistic anti-receptor antibody that immunospecifically binds human CTLA-4, PD-1, PD-L1, TIM-3, BTLA, VISTA, LAG-3, KIR, CD47, CD25, B7-H3, or B7-H4; and (c) an anti-ligand antibody that blocks function of IL-6, IL-10, TGFβ, angiopoetin-2, VEGF, IL-17, IL-23, or TNFα.

2. The use of claim 1, wherein the cancer is selected from the group consisting of: colorectal cancer, melanoma, B-cell lymphoma and fibrosarcoma.

3. The use of claim 1 or 2, wherein the human patient does not have detectable free IGF-1 in serum prior to administration of the istiratumab to treat the cancer.

4. The use of any one of claims 1-3, wherein the PD-1 blocking antibody is nivolumab.

5. The use of any one of claims 1-4, wherein the cancer is melanoma.

6. The use of any one of claims 1-5, wherein the human patient does not have an active autoimmune condition prior to the administration of the istiratumab.

7. The use of any one of claims 1-6, wherein the istiratumab is administered once every two weeks to treat the cancer in the human patient.

8. The use of any one of claims 1-7, wherein the istiratumab is administered at a dose of 40 mg/kg or 2.8 g once every two weeks.

9. The use of any one of claims 1-8, wherein the PD-1 blocking antibody is administered once every 2 weeks at a dose of 3 mg/kg.

10. The use of any one of claims 1-3 and 5-8, wherein the anti-CTLA-4 antibody is ipilimumab or tremelimumab.

11. The use of any one of claims 1-9, wherein the anti-PD-1 antibody is selected from the group consisting of nivolumab, pembrolizumab, and pidilizumab.

12. The use of any one of claims 1-3 and 5-8, wherein the anti-PD-L1 antibody is selected from the group consisting of atezolizumab, durvalumab, and avelumab.

13. The use of claim 12, wherein the anti-PD-L1 antibody is atezolizumab.

14. The use of any one of claims 1-3 and 5-8, wherein the immunomodulatory agent is lirilumab.

15. The use of any one of claims 1-3, 5-8, and 10, wherein immunomodulatory agent is an anti-CTLA-4 antibody, and the cancer is melanoma.

16. The use of a therapeutically effective amount of istiratumab as an immune-oncology monotherapy to treat colorectal cancer, melanoma, B-cell lymphoma or fibrosarcoma cancer in a human patient without a diagnosed active autoimmune condition.

17. The use of claim 16, wherein the human patient has immune cells expressing IGF-1R and ErbB3.

18. The use of any one of claims 15-17, wherein the therapeutically effective amount of istiratumab is administered once every week or once every two weeks.

19. The use of any one of claims 15-18, wherein the therapeutically effective amount of istiratumab is a fixed dose of 2.8 g, 2.24 g, or 1.96 g or 40 mg/kg administered once every two weeks.

20. The use of an antineoplastic therapy consisting of a therapeutically effective amount of istiratumab in combination with an immunomodulatory agent selected from the group consisting of: an anti-PD-L1 antibody, an anti-CTLA-4 antibody and an anti-PD-1 antibody, to treat colorectal cancer, melanoma, B-cell lymphoma or fibrosarcoma cancer in a human patient having immune cells expressing IGF-1R and ErbB3 and without a diagnosed active autoimmune condition.

21. The use of claim 20, wherein the human patient has Treg cells expressing IGF-1R and ErbB3.

22. The use of claim 20 or 21, wherein the therapeutically effective amount of istiratumab is administered once every week or once every two weeks.

23. The use of any one of claims 20-22, wherein the therapeutically effective amount of istiratumab is a fixed dose of 2.8 g, 2.24 g, or 1.96 g or 40 mg/kg administered once every two weeks.

24. The use of any one of claims 16-23, wherein the patient has cancer cells that do not express at least one of IGF-1R and ErbB3.

25. The use of a therapeutically effective amount of istiratumab as an immune-oncology to treat a cancer that does not express at least one of IGF-1R and ErbB3 in a human patient without a diagnosed active autoimmune condition, and having immune cells expressing IGF-1R and ErbB3.

26. The use of claim 16, wherein the cancer is selected from the group consisting of: colorectal cancer, melanoma, B-cell lymphoma and fibrosarcoma cancer.

27. The use of any one of claims 24-26, wherein the therapeutically effective amount of istiratumab is administered as a monotherapy, without another immunomodulatory agent, once every week or once every two weeks.

28. The use of claim 27, wherein the therapeutically effective amount of istiratumab is a fixed dose of 2.8 g, 2.24 g, or 1.96 g or 40 mg/kg administered once every two weeks.

29. The use of an antineoplastic therapy consisting of istiratumab in combination with an immunomodulatory agent selected from the group consisting of: an anti-PD-L1 antibody, an anti-CTLA-4 antibody and an anti-PD-1 antibody, to treat a cancer that does not express at least one of IGF-1R and ErbB3 in a human patient without a diagnosed active autoimmune condition, and having immune cells expressing IGF-1R and ErbB3 in a human patient without a diagnosed active autoimmune condition.

30. The use of claim 29, wherein the cancer is selected from the group consisting of: colorectal cancer, melanoma, B-cell lymphoma and fibrosarcoma cancer.

31. The use of claim 29 or 30, wherein the therapeutically effective amount of istiratumab is administered as an antineoplastic therapy consisting of istiratumab and the immunomodulatory agent, once every week or once every two weeks.

32. The use of claim 31, wherein the therapeutically effective amount of istiratumab is a fixed dose of 2.8 g, 2.24 g, or 1.96 g or 40 mg/kg administered once every two weeks.
